(19) United States
(12) Patent Application Publication
(10) Pub. No.: US 2024/0175877 A1
(43) Pub. Date: May 30, 2024

(54) ANTI-ARA H 2 ANTIBODIES AND USES THEREOF

(71) Applicant: The General Hospital Corporation, Boston, MA (US)

(72) Inventor: Sarita U. PATIL, Newton, MA (US)

(21) Appl. No.: 18/285,065

(22) PCT Filed: Mar. 31, 2022
(86) PCT No.: PCT/US2022/022888

§ 371 Date: Sep. 29, 2023

Related U.S. Application Data
(60) Provisional application No. 63/169,034, filed on Mar. 31, 2021.

(51) Int. Cl. G01N 33/68; C07K 16/16

(52) U.S. Cl. CPC G01N 33/6854; C07K 16/16; G01N 2800/24; G01N 2800/52

(57) ABSTRACT

The invention provides anti-Ara h 2 antibodies (e.g., an anti-Ara h 2 neutralizing antibody) and methods of using the same, e.g., for treating and/or preventing peanut allergy or sensitivity. Also provided herein are anti-Ara h 2 antibodies and methods of using the same, e.g., for diagnostics and methods of monitoring peanut oral immunotherapy. Also provided are combinations of anti-Ara h 2 antibodies for use in determining a treatment response of an individual with a peanut allergy to peanut exposure. Also provided are methods for assessing a treatment response of an individual with a peanut allergy to peanut exposure.

### CROSS-REFERENCE TO RELATED APPLICATIONS

[0001] This application claims priority to U.S. Provisional Application No. 63/169,034 filed Mar. 31, 2021, which is incorporated by reference in its entirety.

### FIELD OF THE INVENTION

[0002] The present invention is related to human antibodies and antigen-binding fragments of human antibodies that specifically bind to a peanut allergen, therapeutic compositions comprising the antibodies and methods of using those antibodies including diagnostic uses.

### BACKGROUND OF THE INVENTION

[0003] Peanut allergy is one of the most common causes of severe food allergy attacks. Peanut allergy symptoms can be life-threatening (anaphylaxis). For some people with peanut allergy, even miniscule amounts of peanuts can cause a serious reaction.

[0004] Rates of food allergy have nearly tripled in the past two decades, now affecting about 8% of children in the US, and incurring $25 billion in costs annually. There are over 3 million people in the US. More than 1% of children in the United States and Europe have peanut allergy caused by IgE, or allergy antibodies. They can have severe, even life-threatening allergic responses, known as anaphylaxis, to even tiny exposures to peanut. Peanut allergy tends to be persistent even after childhood in about 80% of affected patients. Currently, the only available treatment is avoidance and emergent use of epinephrine, which places our most vulnerable population at significant risk of mortality and morbidity. Recently, Palforzia, an oral immunotherapy (OIT) has been approved by the FDA as a treatment for food allergy.

[0005] OIT clinical trials conducted at Massachusetts General Hospital, like others, have consistently shown that less than one-third of patients develop lasting tolerance after cessation of peanut OIT, and the rate of reactions and anaphylaxis requiring epinephrine during OIT poses a serious and significant burden. Therefore, even with potential future implementation of OIT, a significant portion of patients with IgE-mediated food allergy will require treatment to prevent anaphylactic reactions on accidental encounters with peanut allergen.

[0006] A need therefore exists for compositions and methods for treating peanut allergy.

### SUMMARY OF THE INVENTION

[0007] The invention provides antibodies and antigen-binding fragments thereof that bind specifically to the peanut allergen, Ara h 2. Such antibodies may be useful to bind the Ara h 2 allergen in vivo following exposure of a sensitized patient to a peanut allergen, and as such, may act to either promote clearance of Ara h 2, neutralization of the effects of Ara h 2 or to block the binding of the allergen to pre-formed IgE on the surface of mast cells or basophils. By doing so, the antibodies disclosed herein may prevent the release of histamine or other inflammatory mediators from mast cells or basophils, thereby preventing or diminishing the untoward effects observed in patients sensitized to a peanut allergen such as Ara h 2.

[0008] Peanut allergy occurs when an individual's immune system mistakenly identifies peanut proteins such as Ara h 2 as something harmful. Direct or indirect contact with peanuts causes the individual's immune system to release symptom-causing chemicals such as histamines into their bloodstream. Exposure to peanuts can trigger an allergic reaction and can occur in various ways including, without limitation, direct contact (e.g., eating peanuts or peanut-containing foods or through direct skin contact with peanuts); cross-contact (e.g., an unintended introduction of peanuts into a product) or inhalation (e.g., an allergic reaction may occur if an individual inhales dust or aerosols containing peanuts, from a source such as peanut flour or peanut oil cooking spray).

[0009] In certain applications, the antibodies described herein may reduce, minimize, or prevent at least one symptom in a patient sensitive to the Ara h 2 peanut allergen, such as skin reactions such as hives, redness or swelling, itching or tingling in or around the mouth or throat, digestive problems such as diarrhea, stomach cramps, nausea, or vomiting, tightening of the throat, sneezing, congestion, nasal blockage, coughing, wheezing, bronchoconstriction, rhinitis, or shortness of breath. In other applications, the antibodies may be capable of preventing even more serious in vivo complications associated with exposure to the peanut allergen in sensitized individuals, such as asthmatic responses, swelling of the throat that makes it difficult to breath, a severe drop in blood pressure (shock), rapid pulse, dizziness, lightheadedness or loss of consciousness, anaphylaxis, or even death. Children and adults who have a severe peanut allergy are especially at risk of having this life-threatening reaction.

[0010] The antibody compositions and methods disclosed herein address an unmet need in the art.

[0011] Expert guidelines for treatment of peanut allergy recommend that, for example, patients are counseled to avoid the allergen and to use injectable epinephrine for treatment of anaphylaxis should exposure occur. However, up to 25% of pediatric visits to an emergency department are for treatment of IgE-mediated hypersensitivity, and there is growing recognition of the burden of the costs of this strategy, both in direct medical costs as well as indirect costs. The financial, social, and psychological burden of food allergy is considerable, and widely evident in our daily lives.

[0012] Passive protection using peanut-specific protective antibodies disclosed herein provide an extra margin of safety for patients with IgE-mediated food allergies, for example, by preventing allergic reactions to accidental ingestion or exposure. One of the most common reasons that patients and their families seek further therapy for food allergy is for the prevention of IgE-mediated food allergic reactions. Passive protection allows clinicians to provide a therapy with low risk for allergic reactions and which can provide long-lasting protection against reactions to accidental exposures.

[0013] Furthermore, patients who are not eligible for other treatments such as OIT, due to underlying eosinophilic esophagitis or extreme sensitivity to the allergen, would still be able to tolerate a strategy of passive protection. In clinical trials, the majority of patients experience side effects and even those who undergo OIT can still have episodes of treatment-related anaphylaxis. Passive protection offers the possibility of treatment without the side effects of allergen exposure. Lastly, passive immunization with peanut-specific antibodies may be an effective adjunctive therapy to immunotherapy as a strategy to decrease the high rate of adverse events known to occur with immunotherapy.

[0014] The development of peanut-specific antibodies that effectively neutralize the allergen further provide a useful diagnostic tool for monitoring clinical tolerance development during allergen-specific immunotherapy. In most forms of immunotherapy, both oral or sublingual, patients are subjected to repeated oral challenges to evaluate the development of tolerance. Suppression of effector cells and basophils has been shown to be effective biomarkers of tolerance in OIT, and that this suppression is mediated by antibodies in the serum.

[0015] Furthermore, a competitive assay using the antibodies described herein would be highly effective for monitoring tolerance during immunotherapy. In this assay, a comparison of individuals' OIT-induced allergen-specific antibodies with the pre-defined protective antibodies is utilized to determine whether their post-OIT antibody repertoire will effectively protect them against peanut exposures, without the need for repeated financially and medically intensive oral food challenges. As OIT is increasingly adopted outside of clinical trials, a robust methodology of monitoring tolerance is needed. The diagnostic test disclosed herein that relies on patient serum is superior as opposed to the methodology employed in previous clinical trials, which relies of a technically challenging and biologically variable assay that activates short-lived effector cells.

[0016] In one aspect, the invention features a combination of anti-Ara h 2 antibodies for use in determining a treatment response of an individual with a peanut allergy to peanut exposure, wherein the combination comprises one or more anti-Ara h 2 antibodies that bind the following Ara h 2 epitope bin: (a) a first epitope bin comprising epitopes of one or more of anti-Ara h 2 antibodies P34, T1, T3, P33, P17, P21, P3, P13, P10, P11, P14, P19, P28, P30, P39, U1, 13FU1P1A4, 13FU1P1B4, 14FU2P1A11, 15FU1P1A3, 13FU1P2B12, 11FUP1A2, 18FU1P1A7, 23FUP1A8, 23FUP1B8, 23FUP1C4, 23FUP1D6, 23FUP1 D12, 24BU7P1A10, 24BU7P1B6, 24BU7P1 D1, 24BU7P1C10, 24BU7P1D9, 24BU7P1C2, 105BU7P1A11, 105BU7P1C3, 105BU7P1D7, 105BU7P1D12, and 33BU7P1 D11, wherein P34 comprises the following complementarity determining regions (CDRs): a CDR-H1 comprising the amino acid sequence of GFTFDDYT (SEQ ID NO:341), a CDR-H2 comprising the amino acid sequence of IRWDGSRT (SEQ ID NO:342), a CDR-H3 comprising the amino acid sequence of VKDGGLRYFDS (SEQ ID NO:343), a CDR-L1 comprising the amino acid sequence of QSLLHSNGIHY (SEQ ID NO:344), a CDR-L2 comprising the amino acid sequence of LGS (SEQ ID NO:345), and a CDR-L3 comprising the amino acid sequence of MQSLQTFT (SEQ ID NO:346).

[0017] In another aspect, the invention features a combination of anti-Ara h 2 antibodies for use in determining a treatment response of an individual with a peanut allergy to peanut exposure, wherein the combination comprises two or more anti-Ara h 2 antibodies that bind the following Ara h 2 epitope bins: (a) a first epitope bin comprising epitopes of one or more of anti-Ara h 2 antibodies P34, T1, T3, P33, P17, P21, P3, P13, P10, P11, P14, P19, P28, P30, P39, U1, 13FU1P1A4, 13FU1P1B4, 14FU2P1A11, 15FU1P1A3, 13FU1P2B12, 11FUP1A2, 18FU1P1A7, 23FUP1A8, 23FUP1B8, 23FUP1C4, 23FUP1D6, 23FUP1 D12, 24BU7P1A10, 24BU7P1B6, 24BU7P1 D1, 24BU7P1C10, 24BU7P1D9, 24BU7P1C2, 105BU7P1A11, 105BU7P1C3, 105BU7P1D7, 105BU7P1D12, and 33BU7P1 D11, wherein P34 comprises the following complementarity determining regions (CDRs): a CDR-H1 comprising the amino acid sequence of GFTFDDYT (SEQ ID NO:341), a CDR-H2 comprising the amino acid sequence of IRWDGSRT (SEQ ID NO:342), a CDR-H3 comprising the amino acid sequence of VKDGGLRYFDS (SEQ ID NO:343), a CDR-L1 comprising the amino acid sequence of QSLLHSNGIHY (SEQ ID NO:344), a CDR-L2 comprising the amino acid sequence of LGS (SEQ ID NO:345), and a CDR-L3 comprising the amino acid sequence of MQSLQTFT (SEQ ID NO:346); and (b) a second epitope bin comprising epitopes of one or more of anti-Ara h 2 antibodies P31, T4, T5, S4, 14FU2P1 D6, 15FU1P3A6, 13FU1P2B10, and 27FU1P3A10, wherein P31 comprises the following CDRs: a CDR-H1 comprising the amino acid sequence of GDPFTSYY (SEQ ID NO:301), a CDR-H2 comprising the amino acid sequence of IFTTGST (SEQ ID NO:302), a CDR-H3 comprising the amino acid sequence of ARVRRYCSGGRCYPYFYMDV (SEQ ID NO:303), a CDR-L1 comprising the amino acid sequence of ESISSW (SEQ ID NO:304), a CDR-L2 comprising the amino acid sequence of EAS (SEQ ID NO:305), and a CDR-L3 comprising the amino acid sequence of QHYNSDSLT (SEQ ID NO:306).

[0018] In another aspect, the invention features a combination of anti-Ara h 2 antibodies for use in determining a treatment response of an individual with a peanut allergy to peanut exposure, wherein the combination comprises two or more anti-Ara h 2 antibodies that bind the following Ara h 2 epitope bins: (a) a first epitope bin comprising epitopes of one or more of anti-Ara h 2 antibodies P34, T1, T3, P33, P17, P21, P3, P13, P10, P11, P14, P19, P28, P30, P39, U1, 13FU1P1A4, 13FU1P1B4, 14FU2P1A11, 15FU1P1A3, 13FU1P2B12, 11FUP1A2, 18FU1P1A7, 23FUP1A8, 23FUP1B8, 23FUP1C4, 23FUP1D6, 23FUP1D12, 24BU7P1A10, 24BU7P1B6, 24BU7P1D1, 24BU7P1C10, 24BU7P1D9, 24BU7P1C2, 105BU7P1A11, 105BU7P1C3, 105BU7P1D7, 105BU7P1D12, and 33BU7P1D11, wherein P34 comprises the following complementarity determining regions (CDRs): a CDR-H1 comprising the amino acid sequence of GFTFDDYT (SEQ ID NO:341), a CDR-H2 comprising the amino acid sequence of IRWDGSRT (SEQ ID NO:342), a CDR-H3 comprising the amino acid sequence of VKDGGLRYFDS (SEQ ID NO:343), a CDR-L1 comprising the amino acid sequence of QSLLHSNGIHY (SEQ ID NO:344), a CDR-L2 comprising the amino acid sequence of LGS (SEQ ID NO:345), and a CDR-L3 comprising the amino acid sequence of MQSLQTFT (SEQ ID NO:346); and (c) a third epitope bin comprising an epitope of anti-Ara h 2 antibody S1, 27FU1P3A4, 6BU4P2B1, and 89BU7P1B10, wherein S1 comprises the following CDRs: a CDR-H1 comprising the amino acid sequence of GFSFSDSY (SEQ ID NO:381), a CDR-H2 comprising the amino acid sequence of ISGSGEII (SEQ ID NO:382), a CDR-H3 comprising the amino acid sequence of ARPSDYFETSEELD (SEQ ID NO:383), a CDR-L1 comprising the amino acid sequence of QSISTY (SEQ ID NO:384), a CDR-L2 comprising the amino acid sequence of AAS (SEQ ID NO:385), and a CDR-L3 comprising the amino acid sequence of HQSYSAPRT (SEQ ID NO:386).

[0019] In another aspect, the invention features a combination of anti-Ara h 2 antibodies for use in determining a treatment response of an individual with a peanut allergy to peanut exposure, wherein the combination comprises two or more anti-Ara h 2 antibodies that bind the following Ara h 2 epitope bins: (b) a second epitope bin comprising epitopes of one or more of anti-Ara h 2 antibodies P31, T4, T5, S4, 14FU2P1D6, 15FU1P3A6, 13FU1P2B10, and 27FU1P3A10, wherein P31 comprises the following CDRs: a CDR-H1 comprising the amino acid sequence of GDPFTSYY (SEQ ID NO:301), a CDR-H2 comprising the amino acid sequence of IFTTGST (SEQ ID NO:302), a CDR-H3 comprising the amino acid sequence of ARVRRYCSGGRCYPYFYMDV (SEQ ID NO:303), a CDR-L1 comprising the amino acid sequence of ESISSW (SEQ ID NO:304), a CDR-L2 comprising the amino acid sequence of EAS (SEQ ID NO:305), and a CDR-L3 comprising the amino acid sequence of QHYNSDSLT (SEQ ID NO:306); and (c) a third epitope bin comprising an epitope of anti-Ara h 2 antibody S1, 27FU1P3A4, 6BU4P2B1, and 89BU7P1B10, wherein S1 comprises the following CDRs: a CDR-H1 comprising the amino acid sequence of GFSFSDSY (SEQ ID NO:381), a CDR-H2 comprising the amino acid sequence of ISGSGEII (SEQ ID NO:382), a CDR-H3 comprising the amino acid sequence of ARPSDYFETSEELD (SEQ ID NO:383), a CDR-L1 comprising the amino acid sequence of QSISTY (SEQ ID NO:384), a CDR-L2 comprising the amino acid sequence of AAS (SEQ ID NO:385), and a CDR-L3 comprising the amino acid sequence of HQSYSAPRT (SEQ ID NO:386).

[0020] In another aspect, the invention features a combination of anti-Ara h 2 antibodies for use in determining a treatment response of an individual with a peanut allergy to peanut exposure, wherein the combination comprises three or more anti-Ara h 2 antibodies that bind the following Ara h 2 epitope bins: (a) a first epitope bin comprising epitopes of one or more of anti-Ara h 2 antibodies P34, T1, T3, P33, P17, P21, P3, P13, P10, P11, P14, P19, P28, P30, P39, U1, 13FU1P1A4, 13FU1P1B4, 14FU2P1A11, 15FU1P1A3, 13FU1P2B12, 11FUP1A2, 18FU1P1A7, 23FUP1A8, 23FUP1B8, 23FUP1C4, 23FUP1D6, 23FUP1D12, 24BU7P1A10, 24BU7P1B6, 24BU7P1D1, 24BU7P1C10, 24BU7P1D9, 24BU7P1C2, 105BU7P1A11, 105BU7P1C3, 105BU7P1D7, 105BU7P1D12, and 33BU7P1D11, wherein P34 comprises the following complementarity determining regions (CDRs): a CDR-H1 comprising the amino acid sequence of GFTFDDYT (SEQ ID NO:341), a CDR-H2 comprising the amino acid sequence of IRWDGSRT (SEQ ID NO:342), a CDR-H3 comprising the amino acid sequence of VKDGGLRYFDS (SEQ ID NO:343), a CDR-L1 comprising the amino acid sequence of QSLLHSNGIHY (SEQ ID NO:344), a CDR-L2 comprising the amino acid sequence of LGS (SEQ ID NO:345), and a CDR-L3 comprising the amino acid sequence of MQSLQTFT (SEQ ID NO:346); (b) a second epitope bin comprising epitopes of one or more of anti-Ara h 2 antibodies P31, T4, T5, S4, 14FU2P1D6, 15FU1P3A6, 13FU1P2B10, and 27FU1P3A10, wherein P31 comprises the following CDRs: a CDR-H1 comprising the amino acid sequence of GDPFTSYY (SEQ ID NO:301), a CDR-H2 comprising the amino acid sequence of IFTTGST (SEQ ID NO:302), a CDR-H3 comprising the amino acid sequence of ARVRRYCSGGRCYPYFYMDV (SEQ ID NO:303), a CDR-L1 comprising the amino acid sequence of ESISSW (SEQ ID NO:304), a CDR-L2 comprising the amino acid sequence of EAS (SEQ ID NO:305), and a CDR-L3 comprising the amino acid sequence of QHYNSDSLT (SEQ ID NO:306); (c) a third epitope bin comprising an epitope of anti-Ara h 2 antibody S1, 27FU1P3A4, 6BU4P2B1, and 89BU7P1B10, wherein S1 comprises the following CDRs: a CDR-H1 comprising the amino acid sequence of GFSFSDSY (SEQ ID NO:381), a CDR-H2 comprising the amino acid sequence of ISGSGEII (SEQ ID NO:382), a CDR-H3 comprising the amino acid sequence of ARPSDYFETSEELD (SEQ ID NO:383), a CDR-L1 comprising the amino acid sequence of QSISTY (SEQ ID NO:384), a CDR-L2 comprising the amino acid sequence of AAS (SEQ ID NO:385), and a CDR-L3 comprising the amino acid sequence of HQSYSAPRT (SEQ ID NO:386); and, optionally, (d) a fourth epitope bin comprising epitopes of one or more of anti-Ara h 2 antibodies P7, P6, 111BU7P1A12, 111BU7P1D2, 111BU7P1D5, 24BU7P1D3, and 24BU7P1B1, wherein P7 comprises the following CDRs: a CDR-H1 comprising the amino acid sequence of GFTFTRYA (SEQ ID NO:41), a CDR-H2 comprising the amino acid sequence of ISHDGGTK (SEQ ID NO:42), a CDR-H3 comprising the amino acid sequence of AKTCSSPSCYDTAYYFDY (SEQ ID NO:43), a CDR-L1 comprising the amino acid sequence of QSLGNY (SEQ ID NO:44), a CDR-L2 comprising the amino acid sequence of DAS (SEQ ID NO:45), and a CDR-L3 comprising the amino acid sequence of QQRSQFMWT (SEQ ID NO:46).

[0021] In some embodiments of any of the preceding aspects, the epitopes of the one or more anti-Ara h 2 antibodies of the fourth epitope bin comprise the amino acid sequence of DPYS (SEQ ID NO:1880) or DPYSZS (SEQ ID NO:1881).

[0022] In some embodiments of any of the preceding aspects, the combination further comprises one or more anti-Ara h 2 antibodies that bind: (e) a fifth epitope bin comprising epitopes of one or more anti-Ara h 2 antibodies 24B7D4, T6, 15FU1P3A1, 23FUP1C10, 23FUP1D8, and 24BU7P1 D4.

[0023] In some embodiments of any of the preceding aspects, the epitope of the one or more anti-Ara h 2 antibodies of the fifth epitope bin comprises the amino acid sequence of QSQLER (SEQ ID NO:1882).

[0024] In some embodiments of any of the preceding aspects, the combination further comprises one or more anti-Ara h 2 antibodies that bind: (f) a sixth epitope bin comprising epitopes of one or more of anti-Ara h 2 antibodies P8, P16, and P22.

[0025] In some embodiments of any of the preceding aspects, the epitopes of the one or more anti-Ara h 2 antibodies of the sixth epitope bin comprise the amino acid sequence of KRELRNL (SEQ ID NO:1883).

[0026] In some embodiments of any of the preceding aspects, the combination further comprises one or more anti-Ara h 2 antibodies that bind: (g) a seventh epitope bin comprising epitopes of one or more anti-Ara h 2 antibodies 105BU7P1D6 and 105BU7P1D8.

[0027] In some embodiments of any of the preceding aspects, the epitopes of the one or more anti-Ara h 2 antibodies of the seventh epitope bin comprise the amino acid sequence of RQQEQQ (SEQ ID NO:1885).

[0028] In some embodiments of any of the preceding aspects, the combination further comprises one or more anti-Ara h 2 antibodies that bind: (h) an eighth epitope bin comprising an epitope of anti-Ara h 2 antibody 29BU7P1D1.

[0029] In some embodiments of any of the preceding aspects, the epitopes of the one or more anti-Ara h 2 antibodies of the seventh epitope bin comprise the amino acid sequence of CEALQQ (SEQ ID NO:1887).

[0030] In another aspect, the invention features a combination of anti-Ara h 2 antibodies for use in determining a treatment response of an individual with a peanut allergy to peanut exposure, wherein the combination comprises anti-Ara h 2 antibodies: (a) P34, P33, or P17; (b) P31; (c) S1; and (d) P7.

[0031] In some embodiments of any of the preceding aspect, the combination comprises anti-Ara h 2 antibodies: (a) P34; (b) P31; (c) S1; and (d) P7.

[0032] In another aspect, the invention features a method for assessing a treatment response of an individual with a peanut allergy to peanut exposure, the method comprising measuring anti-Ara h 2 antibodies in a sample from a subject using a competitive assay comprising one or more anti-Ara h 2 antibodies (e.g., one or more of the anti-Ara h 2 antibodies disclosure herein).

[0033] In some embodiments, the competitive assay includes one or more anti-Ara h 2 antibodies from one or more of the epitope bins disclosed herein, e.g., any of the combinations of antibodies disclosed herein. For example, in some embodiments, the competitive assay comprises one or more anti-Ara h 2 antibodies that are included in one or more of the following conformational epitope bins: Bin 1, Bin 2, Bin 3, Bin 1 and Bin 2, Bin 1 and Bin 3, Bin 2 and Bin 3, or Bin 1, Bin 2, and Bin 3. In some embodiments, the competitive assay comprises one or more anti-Ara h 2 antibodies that are included in any of the linear epitope bins described herein.

[0034] In some embodiments, the one or more anti-Ara h 2 antibodies comprise a combination of one or more anti-Ara h 2 antibodies that bind the following Ara h 2 epitope bins: (a) a first epitope bin comprising epitopes of one or more of anti-Ara h 2 antibodies P34, T1, T3, P33, P17, P21, P3, P13, P10, P11, P14, P19, P28, P30, P39, U1, 13FU1P1A4, 13FU1P1B4, 14FU2P1A11, 15FU1P1A3, 13FU1P2B12, 11FUP1A2, 18FU1P1A7, 23FUP1A8, 23FUP1B8, 23FUP1C4, 23FUP1D6, 23FUP1D12, 24BU7P1A10, 24BU7P1B6, 24BU7P1D1, 24BU7P1C10, 24BU7P1D9, 24BU7P1C2, 105BU7P1A11, 105BU7P1C3, 105BU7P1D7, 105BU7P1D12, and 33BU7P1D11, wherein P34 comprises the following CDRs: a CDR-H1 comprising the amino acid sequence of GFTFDDYT (SEQ ID NO:341), a CDR-H2 comprising the amino acid sequence of IRWDGSRT (SEQ ID NO:342), a CDR-H3 comprising the amino acid sequence of VKDGGLRYFDS (SEQ ID NO:343), a CDR-L1 comprising the amino acid sequence of QSLLHSNGIHY (SEQ ID NO:344), a CDR-L2 comprising the amino acid sequence of LGS (SEQ ID NO:345), and a CDR-L3 comprising the amino acid sequence of MQSLQTFT (SEQ ID NO:346).

[0035] In some embodiments, the one or more anti-Ara h 2 antibodies comprise a combination of two or more anti-Ara h 2 antibodies that bind the following Ara h 2 epitope bins: (a) a first epitope bin comprising epitopes of one or more of anti-Ara h 2 antibodies P34, T1, T3, P33, P17, P21, P3, P13, P10, P11, P14, P19, P28, P30, P39, U1, 13FU1P1A4, 13FU1P1B4, 14FU2P1A11, 15FU1P1A3, 13FU1P2B12, 11FUP1A2, 18FU1P1A7, 23FUP1A8, 23FUP1B8, 23FUP1C4, 23FUP1D6, 23FUP1D12, 24BU7P1A10, 24BU7P1B6, 24BU7P1D1, 24BU7P1C10, 24BU7P1D9, 24BU7P1C2, 105BU7P1A11, 105BU7P1C3, 105BU7P1D7, 105BU7P1D12, and 33BU7P1D11, wherein P34 comprises the following CDRs: a CDR-H1 comprising the amino acid sequence of GFTFDDYT (SEQ ID NO:341), a CDR-H2 comprising the amino acid sequence of IRWDGSRT (SEQ ID NO:342), a CDR-H3 comprising the amino acid sequence of VKDGGLRYFDS (SEQ ID NO:343), a CDR-L1 comprising the amino acid sequence of QSLLHSNGIHY (SEQ ID NO:344), a CDR-L2 comprising the amino acid sequence of LGS (SEQ ID NO:345), and a CDR-L3 comprising the amino acid sequence of MQSLQTFT (SEQ ID NO:346); and (b) a second epitope bin comprising epitopes of one or more of anti-Ara h 2 antibodies P31, T4, T5, S4, 14FU2P1 D6, 15FU1P3A6, 13FU1P2B10, and 27FU1P3A10, wherein P31 comprises the following CDRs: a CDR-H1 comprising the amino acid sequence of GDPFTSYY (SEQ ID NO:301), a CDR-H2 comprising the amino acid sequence of IFTTGST (SEQ ID NO:302), a CDR-H3 comprising the amino acid sequence of ARVRRYCSGGRCYPYFYMDV (SEQ ID NO:303), a CDR-L1 comprising the amino acid sequence of ESISSW (SEQ ID NO:304), a CDR-L2 comprising the amino acid sequence of EAS (SEQ ID NO:305), and a CDR-L3 comprising the amino acid sequence of QHYNSDSLT (SEQ ID NO:306).

[0036] In some embodiments, the one or more anti-Ara h 2 antibodies comprise a combination of two or more anti-Ara h 2 antibodies that bind the following Ara h 2 epitope bins: (a) a first epitope bin comprising epitopes of one or more of anti-Ara h 2 antibodies P34, T1, T3, P33, P17, P21, P3, P13, P10, P11, P14, P19, P28, P30, P39, U1, 13FU1P1A4, 13FU1P1B4, 14FU2P1A11, 15FU1P1A3, 13FU1P2B12, 11FUP1A2, 18FU1P1A7, 23FUP1A8, 23FUP1B8, 23FUP1C4, 23FUP1D6, 23FUP1D12, 24BU7P1A10, 24BU7P1B6, 24BU7P1D1, 24BU7P1C10, 24BU7P1D9, 24BU7P1C2, 105BU7P1A11, 105BU7P1C3, 105BU7P1D7, 105BU7P1D12, and 33BU7P1D11, wherein P34 comprises the following CDRs: a CDR-H1 comprising the amino acid sequence of GFTFDDYT (SEQ ID NO:341), a CDR-H2 comprising the amino acid sequence of IRWDGSRT (SEQ ID NO:342), a CDR-H3 comprising the amino acid sequence of VKDGGLRYFDS (SEQ ID NO:343), a CDR-L1 comprising the amino acid sequence of QSLLHSNGIHY (SEQ ID NO:344), a CDR-L2 comprising the amino acid sequence of LGS (SEQ ID NO:345), and a CDR-L3 comprising the amino acid sequence of MQSLQTFT (SEQ ID NO:346); and (c) a third epitope bin comprising an epitope of anti-Ara h 2 antibody S1, 27FU1P3A4, 6BU4P2B1, and 89BU7P1B10, wherein S1 comprises the following CDRs: a CDR-H1 comprising the amino acid sequence of GFSFSDSY (SEQ ID NO:381), a CDR-H2 comprising the amino acid sequence of ISGSGEII (SEQ ID NO:382), a CDR-H3 comprising the amino acid sequence of ARPSDYFETSEELD (SEQ ID NO:383), a CDR-L1 comprising the amino acid sequence of QSISTY (SEQ ID NO:384), a CDR-L2 comprising the amino acid sequence of AAS (SEQ ID NO:385), and a CDR-L3 comprising the amino acid sequence of HQSYSAPRT (SEQ ID NO:386).

[0037] In some embodiments, the one or more anti-Ara h 2 antibodies comprise a combination of two or more anti-Ara h 2 antibodies that bind the following Ara h 2 epitope bins: (b) a second epitope bin comprising epitopes of one or more of anti-Ara h 2 antibodies P31, T4, T5, S4, 14FU2P1 D6, 15FU1P3A6, 13FU1P2B10, and 27FU1P3A10, wherein P31 comprises the following CDRs: a CDR-H1 comprising the amino acid sequence of GDPFTSYY (SEQ ID NO:301), a CDR-H2 comprising the amino acid sequence of IFTTGST (SEQ ID NO:302), a CDR-H3 comprising the amino acid sequence of ARVRRYCSGGRCYPYFYMDV (SEQ ID NO:303), a CDR-L1 comprising the amino acid sequence of ESISSW (SEQ ID NO:304), a CDR-L2 comprising the amino acid sequence of EAS (SEQ ID NO:305), and a CDR-L3 comprising the amino acid sequence of QHYNSDSLT (SEQ ID NO:306); and (c) a third epitope bin comprising an epitope of anti-Ara h 2 antibody S1, 27FU1P3A4, 6BU4P2B1, and 89BU7P1B10, wherein S1 comprises the following CDRs: a CDR-H1 comprising the amino acid sequence of GFSFSDSY (SEQ ID NO:381), a CDR-H2 comprising the amino acid sequence of ISGSGEII (SEQ ID NO:382), a CDR-H3 comprising the amino acid sequence of ARPSDYFETSEELD (SEQ ID NO:383), a CDR-L1 comprising the amino acid sequence of QSISTY (SEQ ID NO:384), a CDR-L2 comprising the amino acid sequence of AAS (SEQ ID NO:385), and a CDR-L3 comprising the amino acid sequence of HQSYSAPRT (SEQ ID NO:386).

[0038] In some embodiments, the one or more anti-Ara h 2 antibodies comprise a combination of three or more anti-Ara h 2 antibodies that bind the following Ara h 2 epitope bins: (a) a first epitope bin comprising epitopes of one or more of anti-Ara h 2 antibodies P34, T1, T3, P33, P17, P21, P3, P13, P10, P11, P14, P19, P28, P30, P39, U1, 13FU1P1A4, 13FU1P1B4, 14FU2P1A11, 15FU1P1A3, 13FU1P2B12, 11FUP1A2, 18FU1P1A7, 23FUP1A8, 23FUP1B8, 23FUP1C4, 23FUP1D6, 23FUP1D12, 24BU7P1A10, 24BU7P1B6, 24BU7P1D1, 24BU7P1C10, 24BU7P1D9, 24BU7P1C2, 105BU7P1A11, 105BU7P1C3, 105BU7P1 D7, 105BU7P1 D12, and 33BU7P1D11, wherein P34 comprises the following CDRs: a CDR-H1 comprising the amino acid sequence of GFTFDDYT (SEQ ID NO:341), a CDR-H2 comprising the amino acid sequence of IRWDGSRT (SEQ ID NO:342), a CDR-H3 comprising the amino acid sequence of VKDGGLRYFDS (SEQ ID NO:343), a CDR-L1 comprising the amino acid sequence of QSLLHSNGIHY (SEQ ID NO:344), a CDR-L2 comprising the amino acid sequence of LGS (SEQ ID NO:345), and a CDR-L3 comprising the amino acid sequence of MQSLQTFT (SEQ ID NO:346); (b) a second epitope bin comprising epitopes of one or more of anti-Ara h 2 antibodies P31, T4, T5, S4, 14FU2P1 D6, 15FU1P3A6, 13FU1P2B10, and 27FU1P3A10, wherein P31 comprises the following CDRs: a CDR-H1 comprising the amino acid sequence of GDPFTSYY (SEQ ID NO:301), a CDR-H2 comprising the amino acid sequence of IFTTGST (SEQ ID NO:302), a CDR-H3 comprising the amino acid sequence of ARVRRYCSGGRCYPYFYMDV (SEQ ID NO:303), a CDR-L1 comprising the amino acid sequence of ESISSW (SEQ ID NO:304), a CDR-L2 comprising the amino acid sequence of EAS (SEQ ID NO:305), and a CDR-L3 comprising the amino acid sequence of QHYNSDSLT (SEQ ID NO:306); (c) a third epitope bin comprising an epitope of anti-Ara h 2 antibody S1, 27FU1P3A4, 6BU4P2B1, and 89BU7P1B10, wherein S1 comprises the following CDRs: a CDR-H1 comprising the amino acid sequence of GFSFSDSY (SEQ ID NO:381), a CDR-H2 comprising the amino acid sequence of ISGSGEII (SEQ ID NO:382), a CDR-H3 comprising the amino acid sequence of ARPSDYFETSEELD (SEQ ID NO:383), a CDR-L1 comprising the amino acid sequence of QSISTY (SEQ ID NO:384), a CDR-L2 comprising the amino acid sequence of AAS (SEQ ID NO:385), and a CDR-L3 comprising the amino acid sequence of HQSYSAPRT (SEQ ID NO:386); and, optionally, (d) a fourth epitope bin comprising epitopes of one or more of anti-Ara h 2 antibodies P7, P6, 111BU7P1A12, 111BU7P1D2, 111BU7P1D5, 24BU7P1D3, and 24BU7P1B1.

[0039] In some embodiments, the epitopes of the one or more anti-Ara h 2 antibodies of the fourth epitope bin comprise the amino acid sequence of DPYS (SEQ ID NO:1880) or DPYSZS (SEQ ID NO:1881).

[0040] In some embodiments, the combination further comprises one or more anti-Ara h 2 antibodies that bind: (e) a fifth epitope bin comprising epitopes of one or more anti-Ara h 2 antibodies 24B7D4, T6, 15FU1P3A1, 23FUP1C10, 23FUP1D8, and 24BU7P1D4.

[0041] In some embodiments, the epitope of the one or more anti-Ara h 2 antibodies of the fifth epitope bin comprises the amino acid sequence of QSQLER (SEQ ID NO:1882).

[0042] In some embodiments, the combination further comprises one or more anti-Ara h 2 antibodies that bind: (f) a sixth epitope bin comprising epitopes of one or more of anti-Ara h 2 antibodies P8, P16, and P22.

[0043] In some embodiments, the epitopes of the one or more anti-Ara h 2 antibodies of the sixth epitope bin comprise the amino acid sequence of KRELRNL (SEQ ID NO:1883).

[0044] In some embodiments, the combination further comprises one or more anti-Ara h 2 antibodies that bind: (g) a seventh epitope bin comprising epitopes of one or more anti-Ara h 2 antibodies 105BU7P1D6, and 105BU7P1D8.

[0045] In some embodiments, the epitopes of the one or more anti-Ara h 2 antibodies of the seventh epitope bin comprise the amino acid sequence of RQQEQQ (SEQ ID NO:1885).

[0046] In some embodiments, the combination further comprises one or more anti-Ara h 2 antibodies that bind: (h) an eighth epitope bin comprising an epitope of anti-Ara h 2 antibody 29BU7P1D1.

[0047] In some embodiments, the epitopes of the one or more anti-Ara h 2 antibodies of the seventh epitope bin comprise the amino acid sequence of CEALQQ (SEQ ID NO:1887).

[0048] In some embodiments, the combination comprises anti-Ara h 2 antibodies: (a) P34, P33, or P17; (b) P31; (c) S1; and (d) P7.

[0049] In some embodiments, the combination comprises anti-Ara h 2 antibodies: (a) P34; (b) P31; (c) S1; and (d) P7.

[0050] In some embodiments, the competitive assay comprises bio-layer interferometry (BLI).

[0051] In some embodiments, the sample is a plasma sample.

[0052] In another aspect, the invention features a kit comprising one or more anti-Ara h 2 antibodies and instructions for use in determining the presence or level of Ara h 2 antibodies in a sample.

[0053] In some embodiments, the kit includes one or more anti-Ara h 2 antibodies from one or more of the epitope bins disclosed herein, e.g., any of the combinations of antibodies disclosed herein. For example, in some embodiments, the competitive assay comprises one or more anti-Ara h 2 antibodies that are included in one or more of the following conformational epitope bins: Bin 1, Bin 2, Bin 3, Bin 1 and Bin 2, Bin 1 and Bin 3, Bin 2 and Bin 3, or Bin 1, Bin 2, and Bin 3. In some embodiments, the competitive assay comprises one or more anti-Ara h 2 antibodies that are included in any of the linear epitope bins described herein.

[0054] In some embodiments, the one or more anti-Ara h 2 antibodies comprise a combination of one or more anti-Ara h 2 antibodies that bind the following Ara h 2 epitope bin: (a) a first epitope bin comprising epitopes of one or more of anti-Ara h 2 antibodies P34, T1, T3, P33, P17, P21, P3, P13, P10, P11, P14, P19, P28, P30, P39, U1, 13FU1P1A4, 13FU1P1B4, 14FU2P1A11, 15FU1P1A3, 13FU1P2B12, 11FUP1A2, 18FU1P1A7, 23FUP1A8, 23FUP1B8, 23FUP1C4, 23FUP1D6, 23FUP1D12, 24BU7P1A10, 24BU7P1B6, 24BU7P1D1, 24BU7P1C10, 24BU7P1D9, 24BU7P1C2, 105BU7P1A11, 105BU7P1C3, 105BU7P1D7, 105BU7P1D12, and 33BU7P1D11, wherein P34 comprises the following CDRs: a CDR-H1 comprising the amino acid sequence of GFTFDDYT (SEQ ID NO:341), a CDR-H2 comprising the amino acid sequence of IRWDGSRT (SEQ ID NO:342), a CDR-H3 comprising the amino acid sequence of VKDGGLRYFDS (SEQ ID NO:343), a CDR-L1 comprising the amino acid sequence of QSLLHSNGIHY (SEQ ID NO:344), a CDR-L2 comprising the amino acid sequence of LGS (SEQ ID NO:345), and a CDR-L3 comprising the amino acid sequence of MQSLQTFT (SEQ ID NO:346).

[0055] In some embodiments, the one or more anti-Ara h 2 antibodies comprise a combination of two or more anti-Ara h 2 antibodies that bind the following Ara h 2 epitope bins: (a) a first epitope bin comprising epitopes of one or more of anti-Ara h 2 antibodies P34, T1, T3, P33, P17, P21, P3, P13, P10, P11, P14, P19, P28, P30, P39, U1, 13FU1P1A4, 13FU1P1B4, 14FU2P1A11, 15FU1P1A3, 13FU1P2B12, 11FUP1A2, 18FU1P1A7, 23FUP1A8, 23FUP1B8, 23FUP1C4, 23FUP1D6, 23FUP1D12, 24BU7P1A10, 24BU7P1B6, 24BU7P1D1, 24BU7P1C10, 24BU7P1D9, 24BU7P1C2, 105BU7P1A11, 105BU7P1C3, 105BU7P1D7, 105BU7P1D12, and 33BU7P1D11, wherein P34 comprises the following CDRs: a CDR-H1 comprising the amino acid sequence of GFTFDDYT (SEQ ID NO:341), a CDR-H2 comprising the amino acid sequence of IRWDGSRT (SEQ ID NO:342), a CDR-H3 comprising the amino acid sequence of VKDGGLRYFDS (SEQ ID NO:343), a CDR-L1 comprising the amino acid sequence of QSLLHSNGIHY (SEQ ID NO:344), a CDR-L2 comprising the amino acid sequence of LGS (SEQ ID NO:345), and a CDR-L3 comprising the amino acid sequence of MQSLQTFT (SEQ ID NO:346); and (b) a second epitope bin comprising epitopes of one or more of anti-Ara h 2 antibodies P31, T4, T5, S4, 14FU2P1 D6, 15FU1P3A6, 13FU1P2B10, and 27FU1P3A10, wherein P31 comprises the following CDRs: a CDR-H1 comprising the amino acid sequence of GDPFTSYY (SEQ ID NO:301), a CDR-H2 comprising the amino acid sequence of IFTTGST (SEQ ID NO:302), a CDR-H3 comprising the amino acid sequence of ARVRRYCSGGRCYPYFYMDV (SEQ ID NO:303), a CDR-L1 comprising the amino acid sequence of ESISSW (SEQ ID NO:304), a CDR-L2 comprising the amino acid sequence of EAS (SEQ ID NO:305), and a CDR-L3 comprising the amino acid sequence of QHYNSDSLT (SEQ ID NO:306).

[0056] In some embodiments, the one or more anti-Ara h 2 antibodies comprise a combination of two or more anti-Ara h 2 antibodies that bind the following Ara h 2 epitope bins: (a) a first epitope bin comprising epitopes of one or more of anti-Ara h 2 antibodies P34, T1, T3, P33, P17, P21, P3, P13, P10, P11, P14, P19, P28, P30, P39, U1, 13FU1P1A4, 13FU1P1B4, 14FU2P1A11, 15FU1P1A3, 13FU1P2B12, 11FUP1A2, 18FU1P1A7, 23FUP1A8, 23FUP1B8, 23FUP1C4, 23FUP1D6, 23FUP1D12, 24BU7P1A10, 24BU7P1B6, 24BU7P1D1, 24BU7P1C10, 24BU7P1D9, 24BU7P1C2, 105BU7P1A11, 105BU7P1C3, 105BU7P1D7, 105BU7P1D12, and 33BU7P1D11, wherein P34 comprises the following CDRs: a CDR-H1 comprising the amino acid sequence of GFTFDDYT (SEQ ID NO:341), a CDR-H2 comprising the amino acid sequence of IRWDGSRT (SEQ ID NO:342), a CDR-H3 comprising the amino acid sequence of VKDGGLRYFDS (SEQ ID NO:343), a CDR-L1 comprising the amino acid sequence of QSLLHSNGIHY (SEQ ID NO:344), a CDR-L2 comprising the amino acid sequence of LGS (SEQ ID NO:345), and a CDR-L3 comprising the amino acid sequence of MQSLQTFT (SEQ ID NO:346); and (c) a third epitope bin comprising an epitope of anti-Ara h 2 antibody S1, 27FU1P3A4, 6BU4P2B1, and 89BU7P1B10, wherein S1 comprises the following CDRs: a CDR-H1 comprising the amino acid sequence of GFSFSDSY (SEQ ID NO:381), a CDR-H2 comprising the amino acid sequence of ISGSGEII (SEQ ID NO:382), a CDR-H3 comprising the amino acid sequence of ARPSDYFETSEELD (SEQ ID NO:383), a CDR-L1 comprising the amino acid sequence of QSISTY (SEQ ID NO:384), a CDR-L2 comprising the amino acid sequence of AAS (SEQ ID NO:385), and a CDR-L3 comprising the amino acid sequence of HQSYSAPRT (SEQ ID NO:386).

[0057] In some embodiments, the one or more anti-Ara h 2 antibodies comprise a combination of two or more anti-Ara h 2 antibodies that bind the following Ara h 2 epitope bins: (b) a second epitope bin comprising epitopes of one or more of anti-Ara h 2 antibodies P31, T4, T5, S4, 14FU2P1 D6, 15FU1P3A6, 13FU1P2B10, and 27FU1P3A10, wherein P31 comprises the following CDRs: a CDR-H1 comprising the amino acid sequence of GDPFTSYY (SEQ ID NO:301), a CDR-H2 comprising the amino acid sequence of IFTTGST (SEQ ID NO:302), a CDR-H3 comprising the amino acid sequence of ARVRRYCSGGRCYPYFYMDV (SEQ ID NO:303), a CDR-L1 comprising the amino acid sequence of ESISSW (SEQ ID NO:304), a CDR-L2 comprising the amino acid sequence of EAS (SEQ ID NO:305), and a CDR-L3 comprising the amino acid sequence of QHYNSDSLT (SEQ ID NO:306); and (c) a third epitope bin comprising an epitope of anti-Ara h 2 antibody S1, 27FU1P3A4, 6BU4P2B1, and 89BU7P1B10, wherein S1 comprises the following CDRs: a CDR-H1 comprising the amino acid sequence of GFSFSDSY (SEQ ID NO:381), a CDR-H2 comprising the amino acid sequence of ISGSGEII (SEQ ID NO:382), a CDR-H3 comprising the amino acid sequence of ARPSDYFETSEELD (SEQ ID NO:383), a CDR-L1 comprising the amino acid sequence of QSISTY (SEQ ID NO:384), a CDR-L2 comprising the amino acid sequence of AAS (SEQ ID NO:385), and a CDR-L3 comprising the amino acid sequence of HQSYSAPRT (SEQ ID NO:386).

[0058] In some embodiments, the one or more anti-Ara h 2 antibodies comprise a combination of three or more anti-Ara h 2 antibodies that bind the following Ara h 2 epitope bins: (a) a first epitope bin comprising epitopes of one or more of anti-Ara h 2 antibodies P34, T1, T3, P33, P17, P21, P3, P13, P10, P11, P14, P19, P28, P30, P39, U1, 13FU1P1A4, 13FU1P1B4, 14FU2P1A11, 15FU1P1A3, 13FU1P2B12, 11FUP1A2, 18FU1P1A7, 23FUP1A8, 23FUP1B8, 23FUP1C4, 23FUP1D6, 23FUP1D12, 24BU7P1A10, 24BU7P1B6, 24BU7P1D1, 24BU7P1C10, 24BU7P1D9, 24BU7P1C2, 105BU7P1A11, 105BU7P1C3, 105BU7P1D7, 105BU7P1D12, and 33BU7P1D11, wherein P34 comprises the following CDRs: a CDR-H1 comprising the amino acid sequence of GFTFDDYT (SEQ ID NO:341), a CDR-H2 comprising the amino acid sequence of IRWDGSRT (SEQ ID NO:342), a CDR-H3 comprising the amino acid sequence of VKDGGLRYFDS (SEQ ID NO:343), a CDR-L1 comprising the amino acid sequence of QSLLHSNGIHY (SEQ ID NO:344), a CDR-L2 comprising the amino acid sequence of LGS (SEQ ID NO:345), and a CDR-L3 comprising the amino acid sequence of MQSLQTFT (SEQ ID NO:346); (b) a second epitope bin comprising epitopes of one or more of anti-Ara h 2 antibodies P31, T4, T5, S4, 14FU2P1 D6, 15FU1P3A6, 13FU1P2B10, and 27FU1P3A10, wherein P31 comprises the following CDRs: a CDR-H1 comprising the amino acid sequence of GDPFTSYY (SEQ ID NO:301), a CDR-H2 comprising the amino acid sequence of IFTTGST (SEQ ID NO:302), a CDR-H3 comprising the amino acid sequence of ARVRRYCSGGRCYPYFYMDV (SEQ ID NO:303), a CDR-L1 comprising the amino acid sequence of ESISSW (SEQ ID NO:304), a CDR-L2 comprising the amino acid sequence of EAS (SEQ ID NO:305), and a CDR-L3 comprising the amino acid sequence of QHYNSDSLT (SEQ ID NO:306); (c) a third epitope bin comprising an epitope of anti-Ara h 2 antibody S1, 27FU1P3A4, 6BU4P2B1, and 89BU7P1B10, wherein S1 comprises the following CDRs: a CDR-H1 comprising the amino acid sequence of GFSFSDSY (SEQ ID NO:381), a CDR-H2 comprising the amino acid sequence of ISGSGEII (SEQ ID NO:382), a CDR-H3 comprising the amino acid sequence of ARPSDYFETSEELD (SEQ ID NO:383), a CDR-L1 comprising the amino acid sequence of QSISTY (SEQ ID NO:384), a CDR-L2 comprising the amino acid sequence of AAS (SEQ ID NO:385), and a CDR-L3 comprising the amino acid sequence of HQSYSAPRT (SEQ ID NO:386); and (d) a fourth epitope bin comprising epitopes of one or more of anti-Ara h 2 antibodies P7, P6, 111BU7P1A12, 111BU7P1D2, 111BU7P1D5, 24BU7P1D3, and 24BU7P1B1, wherein P7 comprises the following CDRs: a CDR-H1 comprising the amino acid sequence of GFTFTRYA (SEQ ID NO:41), a CDR-H2 comprising the amino acid sequence of ISHDGGTK (SEQ ID NO:42), a CDR-H3 comprising the amino acid sequence of AKTCSSPSCYDTAYYFDY (SEQ ID NO:43), a CDR-L1 comprising the amino acid sequence of QSLGNY (SEQ ID NO:44), a CDR-L2 comprising the amino acid sequence of DAS (SEQ ID NO:45), and a CDR-L3 comprising the amino acid sequence of QQRSQFMWT (SEQ ID NO:46).

[0059] In some embodiments, the epitopes of the one or more anti-Ara h 2 antibodies of the fourth epitope bin comprise the amino acid sequence of DPYS (SEQ ID NO:1880) or DPYSZS (SEQ ID NO:1881).

[0060] In some embodiments, the combination further comprises one or more anti-Ara h 2 antibodies that bind: (e) a fifth epitope bin comprising epitopes of one or more anti-Ara h 2 antibodies 24B7D4, T6, 15FU1P3A1, 23FUP1C10, 23FUP1D8, and 24BU7P1D4.

[0061] In some embodiments, the epitope of the one or more anti-Ara h 2 antibodies of the fifth epitope bin comprises the amino acid sequence of QSQLER (SEQ ID NO:1882).

[0062] In some embodiments, the combination further comprises one or more anti Ara h 2 antibodies that bind: (f) a sixth epitope bin comprising epitopes of one or more of anti-Ara h 2 antibodies P8, P16, and P22.

[0063] In some embodiments, the epitopes of the one or more anti-Ara h 2 antibodies of the sixth epitope bin comprise the amino acid sequence of KRELRNL (SEQ ID NO:1883).

[0064] In some embodiments, the combination further comprises one or more anti-Ara h 2 antibodies that bind: (g) a seventh epitope bin comprising epitopes of one or more anti-Ara h 2 antibodies 105BU7P1D6, and 105BU7P1D8.

[0065] In some embodiments, the epitopes of the one or more anti-Ara h 2 antibodies of the seventh epitope bin comprise the amino acid sequence of RQQEQQ (SEQ ID NO:1885).

[0066] In some embodiments, the combination further comprises one or more anti-Ara h 2 antibodies that bind: (h) an eighth epitope bin comprising an epitope of anti-Ara h 2 antibody 29BU7P1D1.

[0067] In some embodiments, the epitopes of the one or more anti-Ara h 2 antibodies of the seventh epitope bin comprise the amino acid sequence of CEALQQ (SEQ ID NO:1887).

[0068] In some embodiments, the combination comprises anti-Ara h 2 antibodies: (a) P34, P33, or P17; (b) P31; (c) S1; and (d) P7.

[0069] In some embodiments, the combination comprises anti-Ara h 2 antibodies: (a) P34; (b) P31; (c) S1; and (d) P7.

[0070] Other features and advantages of the invention will be apparent from the following Detailed Description and the Claims.

### BRIEF DESCRIPTION OF THE DRAWINGS

[0071] The application file contains at least one drawing executed in color. Copies of this patent or patent application with color drawings will be provided by the Office upon request and payment of the necessary fee.

[0072] FIG. 1 is a graph showing results of an exemplary assay of the present disclosure.

[0073] FIGS. 2A and 2B are a series of graphs showing that two antibodies from a non-tolerant subject bind the same epitope.

[0074] FIG. 3 is a graph showing results from an experiment performing linear epitope mapping of the DPYSZS epitope.

[0075] FIG. 4 is a schematic diagram of the commercial peptide microarray assay used for mapping of linear epitopes of anti-Ara h 2 antibodies. Each spot in the microarray represents a single individual peptide. After incubation of the peptide microarray with serum or antibody samples, bound antibodies or proteins can be detected using fluorescently labeled secondary antibodies.

[0076] FIG. 5 is a fluorescence readout image of a mini-array incubated with the antibody sample 111BU7P1D5 (here: sample dilution 1:1000). Colors: black—no signal, shades of red—increasing intensity of detected signal, and white—detector saturation. Individual subarrays are framed green. Human IgG control spots are located beneath the subarrays.

[0077] FIG. 6 is a heatmap showing results from the peptide microarray assay showing incubations of the antibody samples, controls and all probed peptides; the y-axis represents peptide sequences in the library, and x-axis specifies samples applied. The MMC2 values are shown as color coded ranging from white (0 or low intensity) over yellow (middle intensity) to red (high intensity).

[0078] FIGS. 7A and 7B show sequences of peptides bound by antibodies as described in Example 6.

[0079] FIGS. 8A-8C show sequences of peptides bound by antibodies as described in Example 6.

[0080] FIG. 9A shows a representative grid of conformational Ara h 2 epitopes as determined by biolayer interferometry (BLI). Each box in the grid represents one experiment in which a primary Ara h 2 specific monoclonal antibody (left) is introduced to a sensor covered with biotinylated Ara h 2 followed by a secondary Ara h 2 specific monoclonal antibody (top).

[0081] FIG. 9B shows an inset of experimental results from FIG. 9A showing an increase in nanomolar (nm) change of secondary antibodies in different bins and no significant change in antibodies within the same bin.

[0082] FIG. 9C shows a map of cloned monoclonal antibodies (sustained unresponsiveness (SU) antibodies=36; transient desensitization (TD) antibodies=44) from both SU and TD patients (n=9 and n=10 respectively).

[0083] FIG. 9D shows BLI results showing simultaneous binding of three monoclonal antibodies, one from each conformational bin and the linear DPYSP^{OH}S epitope.

### DETAILED DESCRIPTION OF THE INVENTION

[0084] Peanut-specific IgG blocking antibodies as well as combinations of such antibodies are disclosed to prevent IgE-mediated allergic reactions in affected patients. Administered subcutaneously, these antibodies provide protection to peanut allergic patients (or patients having peanut hypersensitivity) as a preventive measure. While this therapy would not induce long-term tolerance, as OIT does, it would prevent allergic reactions, which carry mortality and morbidity, without the risks inherent to OIT. Moreover, the approach of using passive protection is particularly important in our most vulnerable population, young children, for whom food allergies can carry additional social and psychological burdens.

[0085] The use of peanut-specific protective antibodies would provide passive protection to pediatric or adult patients with IgE-mediated peanut hypersensitivity, diagnosed by a combination of skin prick testing, specific IgE measurement, component IgE measurement, or oral food challenge. The medication may be administered as a subcutaneous injection, able to be administered at home or in an outpatient office setting by an Allergist. The antibodies described herein may prevent allergic reactions to accidental peanut exposures, direct or indirect, by providing clinical tolerance to an exposure of about 50-300 mg of peanut protein, which is roughly equivalent to 1 peanut. In some instances, the antibodies described herein may provide a clinical tolerance to an exposure to at least about 50-300 mg (e.g., about 50 mg, about 60 mg, about 70 mg, about 80 mg, about 90 mg, about 100 mg, about 120 mg, about 140 mg, about 160 mg, about 180 mg, about 200 mg, about 220 mg, about 240 mg, about 260 mg, about 280 mg, about 300 mg, about 350 mg, about 400 mg, about 450 mg, about 500 mg, about 600 mg, about 700 mg, about 800 mg, about 900 mg, about 1 g, about 3 g, about 5 g, about 10 g, about 30 g, or more) of peanut protein.

[0086] The peanut-specific protective antibodies directed towards the immunodominant peanut antigen Ara h 2 as is disclosed herein were cloned from the circulation of pediatric patients who had sustained tolerance to peanut after OIT. From the same peanut OIT study, the suppression of basophil activation as a good biomarker of future tolerance is known. Furthermore, the suppression of basophils is mediated by IgG in the sera of tolerant patients, from whom the Ara h 2-specific antibodies described herein have been cloned. The protective antibodies were identified as those able to outcompete non-tolerant antibodies using biolayer light interferometry, as those have better antigen blocking capabilities.

[0087] Below we describe the invention as follows:
[0088] I. Definitions for understanding the specification;
[0089] II. Compositions and Methods including Therapy and Diagnostics; and
[0090] III. Examples.

### I. DEFINITIONS

[0091] The term “about” as used herein refers to the usual error range for the respective value readily known to the skilled person in this technical field. Reference to “about” a value or parameter herein includes (and describes) embodiments that are directed to that value or parameter per se.

[0092] The term “peanut allergen” refers to Ara h 2, and isoforms thereof or a protein with an amino acid sequence of at least 90%, preferably of at least 92%, further preferably of at least 95%, and again further preferably of at least 98% amino acid sequence identity with such a peanut allergen and isoform thereof.

[0093] Preferably, the peanut allergen is Ara h 2 with an amino acid sequence of at least, 90%, 92%, 93%, 94%, 95%, 96%, 97%, 98% or even 99% identity with Ara h 2:

[0094] MAKLTILVALALFLLAAHASARQQWELQGDRRCQSQLERANLRPCEQHLMQKIQRDEDSYGRD PYSPSQDPYSPSQDPDRRDPYSPSPYDRRGAGSSQHQERCCNELNEFENNQRCMCEALQQIMENQSD RLQGRQQEQQFKRELRNLPQQCGLRAPQRCDLEVESGGRDRY (SEQ ID NO: 441)
[0095] *Signal sequence is amino acids 1-22, 4-hydroxyproline is located at positions 67, 74, and 86.

[0096] Allergenic fragments of Ara h 2 are also considered peanut allergens and may be identified according to standard methods.

[0097] The terms “anti-Ara h 2 antibody,” “an antibody that binds to Ara h 2,” and “an antibody that specifically binds to Ara h 2” refer to an antibody that is capable of binding Ara h 2 with sufficient affinity such that the antibody is useful as a preventative, diagnostic, and/or therapeutic agent in targeting Ara h 2. In one embodiment, the extent of binding of an anti-Ara h 2 antibody to an unrelated, non-Ara h 2 protein is less than about 10% of the binding of the antibody to Ara h 2 as measured, e.g., by a radioimmunoassay (RIA). In certain embodiments, an antibody that binds to Ara h 2 has a dissociation constant (K_{D}) of ≤1 μM, ≤100 nM, ≤10 nM, ≤1 nM, ≤0.1 nM, ≤0.01 nM, or ≤0.001 nM (e.g. 10⁻⁸ M or less, e.g., from 10⁻⁸ M to 10⁻¹³ M, e.g., from 10⁻⁹ M to 10⁻¹³ M). In certain embodiments, an antibody that binds to Ara h 2 has a K_{D} of between about 0.0001 nM and about 100 nM. In certain embodiments, an anti-Ara h 2 antibody binds to an epitope of Ara h 2 that is conserved among Ara h 2 from different peanut species.

[0098] The term “antibody” as used herein in the broadest sense encompasses various antibody structures, including but not limited to monoclonal antibodies, polyclonal antibodies, multispecific antibodies (e.g., bispecific antibodies), and antibody fragments so long as they exhibit the desired antigen-binding activity. An “antibody” can refer, for example, to a glycoprotein comprising at least two heavy chains (HCs) and two light chains (LCs) inter-connected by disulfide bonds, or an antigen binding portion thereof. Each heavy chain is comprised of a heavy chain variable region (VH) and a heavy chain constant region (CH). The heavy chain constant region may be comprised of three domains, CH1, CH2, and/or CH3. Each light chain is comprised of a light chain variable region (VL) and a light chain constant region (CL). The VH and VL regions can be further subdivided into regions of hypervariability, termed “complementarity determining regions” (CDRs), interspersed with regions that are more conserved, termed “framework regions” (FRs). Each VH and VL may be composed, for example, of three CDRs and four FRs, arranged from amino-terminus to carboxyl-terminus in the following order: FR1, CDR1, FR2, CDR2, FR3, CDR3, and FR4. The variable regions of the heavy and light chains contain a binding domain that interacts with an antigen. The constant regions of the antibodies may mediate the binding of the immunoglobulin to host tissues or factors, including various cells of the immune system (e.g., effector cells) and the first component (Clq) of the classical complement system.

[0099] The terms “full-length antibody,” “intact antibody,” and “whole antibody” are used herein interchangeably to refer to an antibody having a structure substantially similar to a native antibody structure or having heavy chains that contain an Fc region as defined herein.

[0100] The term “human antibody” includes antibodies having variable and constant regions (if present) of human germline immunoglobulin sequences. Human antibodies of the invention can include amino acid residues not encoded by human germline immunoglobulin sequences (e.g., mutations introduced by random or site-specific mutagenesis in vitro or by somatic mutation in vivo) (see, Lonberg, N. et al. (1994) Nature 368(6474): 856-859); Lonberg, N. (1994) Handbook of Experimental Pharmacology 113:49-101; Lonberg, N. and Huszar, D. (1995) Intern. Rev. Immunol. Vol. 13: 65-93, and Harding, F. and Lonberg, N. (1995) Ann. N.Y. Acad. Sci 764:536-546). However, the term “human antibody” does not include antibodies in which CDR sequences derived from the germline of another mammalian species, such as a mouse, have been grafted onto human framework sequences (i.e., humanized antibodies).

[0101] The term “monoclonal antibody,” as used herein, refers to an antibody which displays a single binding specificity and affinity for a particular epitope. Accordingly, the term “human monoclonal antibody,” or “HuMab,” refers to an antibody which displays a single binding specificity, and which has variable and constant regions derived from human germline immunoglobulin sequences. In one embodiment, human monoclonal antibodies are produced by a hybridoma which includes a B cell obtained from a transgenic non-human animal, e.g., a transgenic mouse, having a genome comprising a human heavy chain transgene and a light chain transgene fused to an immortalized cell.

[0102] An “antibody fragment” refers to a molecule other than an intact antibody that comprises a portion of an intact antibody that specifically binds to the antigen (e.g., an Ara h 2 protein described above to which the intact antibody binds. Examples of antibody fragments include but are not limited to Fv, Fab, Fab′, Fab′-SH, F(ab′)₂; diabodies; linear antibodies; single-chain antibody molecules (e.g. scFv); and multispecific antibodies formed from antibody fragments. These antibody fragments are obtained using conventional techniques, and the fragments are screened for utility in the same manner as are intact antibodies. Antibody fragments can be produced by recombinant DNA techniques, or by enzymatic or chemical cleavage of intact immunoglobulins.

[0103] “Affinity” refers to the strength of the sum total of noncovalent interactions between a single binding site of a molecule (e.g., an antibody) and its binding partner (e.g., an antigen). Unless indicated otherwise, as used herein, “binding affinity” refers to intrinsic binding affinity which reflects a 1:1 interaction between members of a binding pair (e.g., antibody and antigen). The affinity of a molecule X for its partner Y can generally be represented by the dissociation constant (K)). Affinity can be measured by common methods known in the art, including those described herein. Specific illustrative and exemplary embodiments for measuring binding affinity are described below.

[0104] The term “K_{D} is measured by a surface plasmon resonance assay,” when used in the context of the claims, means that the K_{D} is measured according the method described in Example 2 which measures kinetic parameters for binding of anti-Ara h 2 antibodies to Ara h 2 described in Patil et al., J. Allergy Clin Immunol. 136(1):125-134 (2015). Typically, the antibodies disclosed herein bind to Ara h 2 with a dissociation equilibrium constant (K_{D}) of less than about 10⁻⁶ M, such as less than approximately 10⁻⁷ M, 10⁻⁸ M, 10⁻⁹ M, or 10⁻¹⁰ M or even lower when determined by surface plasmon resonance (SPR) technology in a BIACORE 3000 instrument using recombinant Ara h 2 as the analyte and the antibody as the ligand.

[0105] The term “EC50,” as used herein, refers to the concentration of an antibody or an antigen-binding portion thereof, which induces a response, either in an in vivo or an in vitro assay, such as neutralization of Ara h 2 (e.g., blocking Ara h 2 binding with a binding partner (e.g., an IgE antibody)) as is described herein, which is 50% of the maximal response (i.e., halfway between the maximal response and the baseline).

[0106] The terms “effective amount,” “effective dose,” and “effective dosage” as used herein are defined as an amount sufficient to achieve, or at least partially achieve, the desired effect. The term “therapeutically effective dose” or “therapeutically effective amount” is defined as an amount sufficient to prevent, cure, or at least partially arrest, the allergic reaction and its complications in a patient already suffering from an allergic reaction to peanut exposure or at risk to being exposed to Ara h 2 or an allergenic fragment thereof. Amounts effective for this use will depend upon the severity of the allergic reaction being treated and the general state of the patient's own immune system.

[0107] The term “epitope” or “antigenic determinant” refers to a site on an antigen to which an immunoglobulin or antibody specifically binds on Ara h 2. Epitopes can be formed both from contiguous amino acids or noncontiguous amino acids juxtaposed by tertiary folding of a protein. Epitopes formed from contiguous amino acids are typically retained on exposure to denaturing solvents, whereas epitopes formed by tertiary folding are typically lost on treatment with denaturing solvents. An epitope typically includes at least 3, 4, 5, 6, 7, 8, 9, 10, 11, 12, 13, 14 or 15 amino acids in a unique spatial conformation. Methods of determining spatial conformation of epitopes include techniques in the art and those described herein, for example, x-ray crystallography, cryo-electron microscopy, and 2-dimensional nuclear magnetic resonance. See, for example, Epitope Mapping Protocols in Methods in Molecular Biology, Vol. 66, G. E. Morris, Ed. (1996). Epitopes can also be defined by point mutations in the target protein (e.g., Ara h 2 or an allergic-inducing fragment thereof), which affect the binding of the antibody (e.g., monoclonal antibody).

[0108] The term “host cell,” as used herein, is intended to refer to a cell into which an expression vector has been introduced. It should be understood that such terms are intended to refer not only to the particular subject cell but to the progeny of such a cell. Because certain modifications may occur in succeeding generations due to either mutation or environmental influences, such progeny may not, in fact, be identical to the parent cell, but are still included within the scope of the term “host cell” as used herein.

[0109] An “isolated antibody” is one which has been identified and separated and/or recovered from a component of its natural environment and/or is substantially free of other antibodies having different antigenic specificities (e.g., an isolated antibody that specifically binds to Ara h 2 is substantially free of antibodies that specifically bind antigens other than Ara h 2). Contaminant components of its natural environment are materials which would interfere with diagnostic or therapeutic uses for the antibody, and may include enzymes, hormones, and other proteinaceous or nonproteinaceous solutes. In preferred embodiments, the antibody will be purified (1) to greater than 95% by weight of antibody as determined by the Lowry method, and most preferably more than 99% by weight, (2) to a degree sufficient to obtain at least 15 residues of N-terminal or internal amino acid sequence by use of a spinning cup sequenator, or (3) to homogeneity by SDS-PAGE under reducing or nonreducing conditions using CoomassieM blue or, preferably, silver stain. Isolated antibody includes the antibody in situ within recombinant cells since at least one component of the antibody's natural environment will not be present. Similarly, isolated antibody includes the antibody in medium around recombinant cells. Ordinarily, however, isolated antibody will be prepared by at least one purification step.

[0110] The term “nucleic acid molecule,” as used herein, is intended to include DNA molecules and RNA molecules. A nucleic acid molecule may be single-stranded or double-stranded, but preferably is double-stranded DNA.

[0111] The term “isolated nucleic acid,” as used herein in reference to nucleic acids molecules encoding antibodies or antibody portions (e.g., VH, VL, CDRs) that bind to Ara h 2, is intended to refer to a nucleic acid molecule in which the nucleotide sequences encoding the antibody or antibody portion are free of other nucleotide sequences encoding antibodies that bind antigens other than Ara h 2, which other sequences may naturally flank the nucleic acid in human genomic DNA.

[0112] “Percent (%) amino acid sequence identity” with respect to a reference polypeptide sequence is defined as the percentage of amino acid residues in a candidate sequence that are identical with the amino acid residues in the reference polypeptide sequence, after aligning the sequences and introducing gaps, if necessary, to achieve the maximum percent sequence identity, and not considering any conservative substitutions as part of the sequence identity. Alignment for purposes of determining percent amino acid sequence identity can be achieved in various ways that are within the skill in the art, for instance, using publicly available computer software such as BLAST, BLAST-2, ALIGN or Megalign (DNASTAR) software. Those skilled in the art can determine appropriate parameters for aligning sequences, including any algorithms needed to achieve maximal alignment over the full length of the sequences being compared. For purposes herein, however, % amino acid sequence identity values are generated using the sequence comparison computer program ALIGN-2. The ALIGN-2 sequence comparison computer program is registered under U.S. Copyright Registration No. TXU510087.

[0113] In situations where ALIGN-2 is employed for amino acid sequence comparisons, the % amino acid sequence identity of a given amino acid sequence A to, with, or against a given amino acid sequence B (which can alternatively be phrased as a given amino acid sequence A that has or comprises a certain % amino acid sequence identity to, with, or against a given amino acid sequence B) is calculated as follows 100 times the fraction X/Y, where X is the number of amino acid residues scored as identical matches by the sequence alignment program ALIGN-2 in that program's alignment of A and B, and where Y is the total number of amino acid residues in B. It will be appreciated that where the length of amino acid sequence A is not equal to the length of amino acid sequence B, the % amino acid sequence identity of A to B will not equal the % amino acid sequence identity of B to A. Unless specifically stated otherwise, all % amino acid sequence identity values used herein are obtained as described in the immediately preceding paragraph using the ALIGN-2 computer program.

[0114] The term “pharmaceutical composition” refers to a preparation which is in such form as to permit the biological activity of an active ingredient contained therein to be effective, and which contains no additional components which are unacceptably toxic to a subject to which the formulation would be administered.

[0115] A “pharmaceutically acceptable carrier” refers to an ingredient in a pharmaceutical formulation, other than an active ingredient, which is nontoxic to a subject. A pharmaceutically acceptable carrier includes, but is not limited to, a buffer, excipient, stabilizer, or preservative.

[0116] As used herein, the terms “specific binding,” “selective binding,” “selectively binds,” and “specifically binds,” refer to antibody binding to an epitope on a predetermined antigen. Typically, the antibody binds with an affinity (Kn) of approximately less than 10⁻⁷ M, such as approximately less than 10⁻⁸ M, 10⁻⁹ M or 10⁻¹⁰ M or even lower when determined by surface plasmon resonance (SPR) technology in a BIACORE 3000 instrument, which can be performed, for example, using recombinant Ara h 2 as the analyte and the antibody as the ligand. In some embodiments, binding by the antibody to the predetermined antigen is with an affinity that is at least two-fold greater than its affinity for binding to a non-specific antigen (e.g., BSA, casein) other than the predetermined antigen or a closely-related antigen. The phrases “an antibody recognizing an antigen” and “an antibody specific for an antigen” are used interchangeably herein with the term “an antibody which binds specifically to an antigen.”

[0117] A “subject,” a “patient,” or an “individual” is typically a human such as an adult, a child, or an infant.

[0118] As used herein, “administering” is meant a method of giving a dosage of a compound (e.g., an anti-Ara h 2 antibody or a nucleic acid encoding an anti-Ara h 2 antibody) or a composition (e.g., a pharmaceutical composition, e.g., a pharmaceutical composition including an anti-Ara h 2 antibody) to a subject. Preferably, the antibodies described herein are administered subcutaneously. The compositions utilized in the methods described herein can be administered, for example, intramuscularly, intravenously, intradermally, percutaneously, intraarterially, intraperitoneally, intralesionally, intracranially, intraarticularly, intraprostatically, intrapleurally, intratracheally, intranasally, intravitreally, intravaginally, intrarectally, topically, intratumorally, peritoneally, subcutaneously, subconjunctivally, intravesicularlly, mucosally, intrapericardially, intraumbilically, intraocularly, orally, topically, locally, by inhalation, by injection, by infusion, by continuous infusion, by localized perfusion bathing target cells directly, by catheter, by lavage, in cremes, or in lipid compositions. The method of administration can vary depending on various factors (e.g., the compound or composition being administered, and the severity of the peanut allergy being treated). Preferably, the antibody or a combination of antibodies (for example, a combination of the T3 and T4 antibodies disclosed herein) are administered as a subcutaneous injection.

[0119] As used herein, the term “vector” is meant to include, but is not limited to, a nucleic acid molecule (e.g., a nucleic acid molecule that is capable of transporting another nucleic acid to which it has been linked), a virus (e.g., a lentivirus or an adenovirus, e.g., a recombinant adeno-associated virus (rAAV)), cationic lipid (e.g., liposome), cationic polymer (e.g., polysome), virosome, nanoparticle, or dentrimer. Accordingly, one type of vector is a viral vector, wherein additional DNA segments (e.g., transgenes, e.g., transgenes encoding the heavy and/or light chain genes of an anti-Ara h 2 antibody) may be ligated into the viral genome, and the viral vector may then be administered (e.g., by electroporation, e.g., electroporation into muscle tissue) to the subject in order to allow for transgene expression in a manner analogous to gene therapy. Another type of vector is a “plasmid,” which refers to a circular double stranded DNA loop into which additional DNA segments may be ligated. Certain vectors are capable of autonomous replication in a host cell into which they are introduced (e.g., bacterial vectors having a bacterial origin of replication and episomal mammalian vectors). Other vectors (e.g., non-episomal mammalian vectors) can be integrated into the genome of a host cell upon introduction into the host cell, and thereby are replicated along with the host genome. Moreover, certain vectors are capable of directing the expression of genes to which they are operatively linked. Such vectors are referred to herein as “recombinant expression vectors” (or simply, “expression vectors”). In general, expression vectors of utility in recombinant DNA techniques are often in the form of plasmids.

### II. COMPOSITIONS AND METHODS

[0120] In one aspect, the invention is based, in part, on anti-Ara h 2 antibodies. Such antibodies are useful, for example, for treating a subject having, or at risk of developing, a peanut allergy following exposure, direct or indirect, to a peanut allergen such as Ara h 2.

### A. Anti-Ara h 2 Antibodies

[0121] The invention provides isolated antibodies (e.g., any of the antibodies described herein) that bind to Ara h 2.

[0122] Accordingly, in one aspect, the invention provides isolated antibody that specifically binds to Ara h 2.

[0123] Exemplary antibodies include those described in the Appendix.

[0124] Antibodies of the invention may, for example, be monoclonal, human, humanized, or chimeric.

[0125] The antibodies can be full-length antibodies or antibody fragments thereof (e.g., an antibody fragment that binds Ara h 2). The antibody fragment may be selected from the group consisting of Fab, Fab′-SH, Fv, scFv, and (Fab′)₂ fragments. In some instances, the antibody is an IgG antibody (e.g., an IgG1 antibody). An antibody of the invention may have a half-life of ≥3 days (e.g., ≥1 week, e.g., ≥2 weeks, e.g., ≥1 month, e.g., ≥2 months, e.g., ≥3 months, e.g., ≥4 months, e.g., ≥5 months, e.g., ≥6 months).

[0126] In a further aspect, an anti-Ara h 2 antibody according to any of the above embodiments may incorporate any of the features, singly or in combination, as described in Sections 1-5 below.

### 1. Antibody Affinity

[0127] In certain embodiments, an antibody provided herein may have a dissociation constant (K)) of ≤10 μM, ≤1 μM, ≤100 nM, ≤10 nM, ≤1 nM, ≤0.1 nM, or ≤0.01 nM.

[0128] In one embodiment, K_{D} is measured by a radiolabeled antigen binding assay (RIA). In one embodiment, an RIA is performed with the Fab version of an antibody of interest and its antigen. For example, solution binding affinity of Fabs for antigen is measured by equilibrating Fab with a minimal concentration of (¹²⁵I)-labeled antigen in the presence of a titration series of unlabeled antigen, then capturing bound antigen with an anti-Fab antibody-coated plate (see, e.g., Chen et al., J. Mol. Biol. 293:865-881(1999)). To establish conditions for the assay, MICROTITER® multi-well plates (Thermo Scientific) are coated overnight with 5 μg/ml of a capturing anti-Fab antibody (Cappel Labs) in 50 mM sodium carbonate (pH 9.6), and subsequently blocked with 2% (w/v) bovine serum albumin in PBS for two to five hours at room temperature (approximately 23° C.). In a non-adsorbent plate (Nunc #269620), 100 pM or 26 pM [¹²⁵I]-antigen are mixed with serial dilutions of a Fab of interest (e.g., consistent with assessment of the anti-VEGF antibody, Fab-12, in Presta et al., Cancer Res. 57:4593-4599 (1997)). The Fab of interest is then incubated overnight; however, the incubation may continue for a longer period (e.g., about 65 hours) to ensure that equilibrium is reached. Thereafter, the mixtures are transferred to the capture plate for incubation at room temperature (e.g., for one hour). The solution is then removed and the plate washed eight times with 0.1% polysorbate 20 (TWEEN-20®) in PBS. When the plates have dried, 150 μl/well of scintillant (MICROSCINT-20™; Packard) is added, and the plates are counted on a TOPCOUNT™ gamma counter (Packard) for ten minutes. Concentrations of each Fab that give less than or equal to 20% of maximal binding are chosen for use in competitive binding assays.

[0129] According to another embodiment, K_{D} is measured using a BIACORE® surface plasmon resonance assay. For example, an assay using a BIACORE®-3000 (BIAcore, Inc., Piscataway, NJ) is performed at 25° C. with immobilized antigen CM5 chips at ˜10 response units (RU). In one embodiment, carboxymethylated dextran biosensor chips (CM5, BIACORE, Inc.) are activated with N-ethyl-N′-(3-dimethylaminopropyl)-carbodiimide hydrochloride (EDC) and N-hydroxysuccinimide (NHS) according to the supplier's instructions. Antigen is diluted with 10 mM sodium acetate, pH 4.8, to 5 μg/ml (˜0.2 μM) before injection at a flow rate of 5 μl/minute to achieve approximately 10 response units (RU) of coupled protein. Following the injection of antigen, 1 M ethanolamine is injected to block unreacted groups. For kinetics measurements, two-fold serial dilutions of Fab (0.78 nM to 500 nM) are injected in PBS with 0.05% polysorbate 20 (TWEEN-20™) surfactant (PBST) at 25° C. at a flow rate of approximately 25 μl/min. Association rates (kₒₙ) and dissociation rates (k_{off}) are calculated using a simple one-to-one Langmuir binding model (BIACORE® Evaluation Software version 3.2) by simultaneously fitting the association and dissociation sensorgrams. The equilibrium dissociation constant (K_{D}) is calculated as the ratio kₒₙ/k_{off}. See, for example, Chen et al., J. Mol. Biol. 293:865-881 (1999). If the on-rate exceeds 10⁶M⁻¹s⁻¹ by the surface plasmon resonance assay above, then the on-rate can be determined by using a fluorescent quenching technique that measures the increase or decrease in fluorescence emission intensity (excitation=295 nm; emission=340 nm, 16 nm band-pass) at 25° C. of a 20 nM anti-antigen antibody (Fab form) in PBS, pH 7.2, in the presence of increasing concentrations of antigen as measured in a spectrometer, such as a stop-flow equipped spectrophometer (Aviv Instruments) or a 8000-series SLM-AMINCO™ spectrophotometer (ThermoSpectronic) with a stirred cuvette.

### 2. Antibody Fragments

[0130] In certain embodiments, an antibody provided herein is an antibody fragment. Antibody fragments include, but are not limited to, Fab, Fab′, Fab′-SH, F(ab′)₂, Fv, and scFv fragments, which are known in the art. Also included are diabodies, which have two antigen-binding sites that may be bivalent or bispecific, as is known in the art. Triabodies and tetrabodies are also known. Single-domain antibodies are also antibody fragments comprising all or a portion of the heavy chain variable domain or all or a portion of the light chain variable domain of an antibody. In certain embodiments, a single-domain antibody is a human single-domain antibody.

[0131] Antibody fragments can be made by various techniques, including but not limited to proteolytic digestion of an intact antibody as well as production by recombinant host cells (e.g., E. coli or phage), as described herein.

### 3. Chimeric and Humanized Antibodies

[0132] In certain embodiments, an antibody provided herein is a chimeric antibody. In one example, a chimeric antibody comprises a non-human variable region (e.g., a variable region derived from a mouse, rat, hamster, rabbit, or non-human primate, such as a monkey) and a human constant region. In a further example, a chimeric antibody is a “class switched” antibody in which the class or subclass has been changed from that of the parent antibody. Chimeric antibodies include antigen-binding fragments thereof.

[0133] In certain embodiments, a chimeric antibody is a humanized antibody. Typically, a non-human antibody is humanized to reduce immunogenicity to humans, while retaining the specificity and affinity of the parental non-human antibody. Generally, a humanized antibody comprises one or more variable domains in which HVRs, e.g., CDRs, (or portions thereof) are derived from a non-human antibody, and FRs (or portions thereof) are derived from human antibody sequences. A humanized antibody optionally will also comprise at least a portion of a human constant region. In some embodiments, some FR residues in a humanized antibody are substituted with corresponding residues from a non-human antibody (e.g., the antibody from which the HVR residues are derived), e.g., to restore or improve antibody specificity or affinity.

[0134] Human framework regions that may be used for humanization include but are not limited to: framework regions selected using the “best-fit” method (see, e.g., Sims et al. J. Immunol. 151:2296 (1993)); framework regions derived from the consensus sequence of human antibodies of a particular subgroup of light or heavy chain variable regions (see, e.g., Carter et al. Proc. Natl. Acad. Sci. USA, 89:4285 (1992); and Presta et al. J. Immunol., 151:2623 (1993)); human mature (somatically mutated) framework regions or human germline framework regions (see, e.g., Almagro and Fransson, Front. Biosci. 13:1619-1633 (2008)); and framework regions derived from screening FR libraries (see, e.g., Baca et al., J. Biol. Chem. 272:10678-10684 (1997) and Rosok et al., J. Biol. Chem. 271:22611-22618 (1996)).

### 4. Human Antibodies

[0135] In certain embodiments, an antibody provided herein is a human antibody (e.g., a human monoclonal antibody (HuMab), e.g., an anti-Ara h 2 HuMab). Human antibodies can be produced using various techniques known in the art.

[0136] In some instances, human antibodies are obtained by cloning the heavy and light chain genes directly from human B cells obtained from a human subject as is described herein in Example 1. The B cells are separated from peripheral blood (e.g., by flow cytometry, e.g., FACS), stained for B cell marker(s), and assessed for antigen binding. The RNA encoding the heavy and light chain variable regions (or the entire heavy and light chains) is extracted and reverse transcribed into DNA, from which the antibody genes are amplified (e.g., by PCR) and sequenced. The known antibody sequences can then be used to express recombinant human antibodies against a known target antigen (e.g., Ara h 2).

[0137] In some instances, human antibodies may be prepared by administering an immunogen (e.g., Ara h 2) to a transgenic animal that has been modified to produce intact human antibodies or intact antibodies with human variable regions in response to antigenic challenge. Such animals typically contain all or a portion of the human immunoglobulin loci, which replace the endogenous immunoglobulin loci, or which are present extrachromosomally or integrated randomly into the animal's chromosomes. In such transgenic mice, the endogenous immunoglobulin loci have generally been inactivated. Human variable regions from intact antibodies generated by such animals may be further modified, for example, by combining with a different human constant region.

[0138] In some instances, human antibodies can also be made by hybridoma-based methods, as described in further detail below. Human myeloma and mouse-human heteromyeloma cell lines for the production of human monoclonal antibodies have been described.

[0139] Human antibodies may also be generated by isolating Fv clone variable domain sequences selected from human-derived phage display libraries. Such variable domain sequences may then be combined with a desired human constant domain. Techniques for selecting human antibodies from antibody libraries are described below.

### 5. Antibody Variants

[0140] In certain embodiments, amino acid sequence variants of the anti-Ara h 2 antibodies are contemplated.

[0141] For example, it may be desirable to improve the binding affinity and/or other biological properties of the antibody. Amino acid sequence variants of an antibody may be prepared by introducing appropriate modifications into the nucleotide sequence encoding the antibody, or by peptide synthesis. Such modifications include, for example, deletions from, and/or insertions into and/or substitutions of residues within the amino acid sequences of the antibody. Any combination of deletion, insertion, and substitution can be made to arrive at the final construct, provided that the final construct possesses the desired characteristics, for example, antigen-binding.

[0142] In certain embodiments, antibody variants having one or more amino acid substitutions are provided. Sites of interest for substitutional mutagenesis include the CDRs and FRs. Conservative substitutions are shown in Table 1 under the heading of “preferred substitutions.” More substantial changes are provided in Table 1 under the heading of “exemplary substitutions,” and as further described below in reference to amino acid side chain classes. Amino acid substitutions may be introduced into an antibody of interest and the products screened for a desired activity, for example, retained/improved antigen binding, decreased immunogenicity, or improved ADCC or CDC.

TABLE 1
Exemplary and Preferred Amino Acid Substitutions

| Original | | Preferred |
|---|---|---|
| Residue | Exemplary Substitutions | Substitutions |
| Ala (A) | Val; Leu; Ile | Val |
| Arg (R) | Lys; Gln; Asn | Lys |
| Asn (N) | Gln; His; Asp, Lys; Arg | Gln |
| Asp (D) | Glu; Asn | Glu |
| Cys (C) | Ser; Ala | Ser |
| Gln (Q) | Asn; Glu | Asn |
| Glu (E) | Asp; Gln | Asp |
| Gly (G) | Ala | Ala |
| His (H) | Asn; Gln; Lys; Arg | Arg |
| Ile (I) | Leu; Val; Met; Ala; Phe; Norleucine | Leu |
| Leu (L) | Norleucine; Ile; Val; Met; Ala; Phe | Ile |
| Lys (K) | Arg; Gln; Asn | Arg |
| Met (M) | Leu; Phe; Ile | Leu |
| Phe (F) | Trp; Leu; Val; Ile; Ala; Tyr | Tyr |
| Pro (P) | Ala | Ala |
| Ser (S) | Thr | Thr |
| Thr (T) | Val; Ser | Ser |
| Trp (W) | Tyr; Phe | Tyr |
| Tyr (Y) | Trp; Phe; Thr; Ser | Phe |
| Val (V) | Ile; Leu; Met; Phe; Ala; Norleucine | Leu |

[0143] Amino acids may be grouped according to common side-chain properties:
[0144] (1) hydrophobic: Norleucine, Met, Ala, Val, Leu, Ile;
[0145] (2) neutral hydrophilic: Cys, Ser, Thr, Asn, Gin;
[0146] (3) acidic: Asp, Glu;
[0147] (4) basic: His, Lys, Arg;
[0148] (5) residues that influence chain orientation: Gly, Pro;
[0149] (6) aromatic: Trp, Tyr, Phe.

[0150] Non-conservative substitutions will entail exchanging a member of one of these classes for another class.

[0151] One type of substitutional variant involves substituting one or more hypervariable region residues of a parent antibody (e.g., a humanized or human antibody). Generally, the resulting variant(s) selected for further study will have modifications (e.g., improvements) in certain biological properties (e.g., increased affinity, reduced immunogenicity) relative to the parent antibody and/or will have substantially retained certain biological properties of the parent antibody. An exemplary substitutional variant is an affinity matured antibody, which may be conveniently generated, e.g., using phage display-based affinity maturation techniques such as those described herein. Briefly, one or more CDR residues are mutated and the variant antibodies displayed on phage and screened for a particular biological activity (e.g., binding affinity).

[0152] Alterations (e.g., substitutions) may be made in CDRs, for example, to improve antibody affinity. Such alterations may be made in CDR “hotspots,” i.e., residues encoded by codons that undergo mutation at high frequency during the somatic maturation process, and/or residues that contact antigen, with the resulting variant VH or VL being tested for binding affinity. Affinity maturation by constructing and reselecting from secondary libraries is known in the art. In some embodiments of affinity maturation, diversity is introduced into the variable genes chosen for maturation by any of a variety of methods (e.g., error-prone PCR, chain shuffling, or oligonucleotide-directed mutagenesis). A secondary library is then created. The library is then screened to identify any antibody variants with the desired affinity. Another method to introduce diversity involves CDR-directed approaches, in which several CDR residues (e.g., 4-6 residues at a time) are randomized. CDR residues involved in antigen binding may be specifically identified, e.g., using alanine scanning mutagenesis or modeling. CDR-H3 and CDR-L3 in particular are often targeted.

[0153] In certain embodiments, substitutions, insertions, or deletions may occur within one or more CDRs so long as such alterations do not substantially reduce the ability of the antibody to bind antigen. For example, conservative alterations (e.g., conservative substitutions as provided herein) that do not substantially reduce binding affinity may be made in CDRs. Such alterations may, for example, be outside of antigen contacting residues in the CDRs. In certain embodiments of the variant VH and VL sequences provided above, each CDR either is unaltered, or contains no more than one, two or three amino acid substitutions.

[0154] A useful method for identification of residues or regions of an antibody that may be targeted for mutagenesis is called “alanine scanning mutagenesis” as described by Cunningham and Wells (1989) Science, 244:1081-1085. In this method, a residue or group of target residues (e.g., charged residues such as arg, asp, his, lys, and glu) are identified and replaced by a neutral or negatively charged amino acid (e.g., alanine or polyalanine) to determine whether the interaction of the antibody with antigen is affected. Further substitutions may be introduced at the amino acid locations demonstrating functional sensitivity to the initial substitutions. Alternatively, or additionally, a crystal structure of an antigen-antibody complex to identify contact points between the antibody and antigen. Such contact residues and neighboring residues may be targeted or eliminated as candidates for substitution. Variants may be screened to determine whether they contain the desired properties.

[0155] Amino acid sequence insertions include amino- and/or carboxyl-terminal fusions ranging in length from one residue to polypeptides containing a hundred or more residues, as well as intrasequence insertions of single or multiple amino acid residues. Examples of terminal insertions include an antibody with an N-terminal methionyl residue. Other insertional variants of the antibody molecule include the fusion to the N- or C-terminus of the antibody to an enzyme (e.g. for ADEPT) or a polypeptide which increases the serum half-life of the antibody.

[0156] In certain embodiments, alterations may be made to the Fc region of an antibody. These alterations can be made alone, or in addition to, alterations to one or more of the antibody variable domains (i.e., VH or VL regions) or regions thereof (e.g., one or more CDRs or FRs). The alterations to the Fc region may result in reduced antibody effector functions (e.g., complement-dependent cytotoxicity (CDC))

[0157] In certain instances, the invention contemplates an antibody, e.g., antibody variant that possesses some but not all effector functions, which make it a desirable candidate for applications in which the half-life of the antibody in vivo is important yet certain effector functions (such as complement and ADCC) are unnecessary or deleterious. In vitro and/or in vivo cytotoxicity assays can be conducted to confirm the reduction/depletion of CDC and/or ADCC activities. For example, Fc receptor (FcR) binding assays can be conducted to ensure that the antibody lacks FcγR binding (hence likely lacking ADCC activity), but retains FcRn binding ability. The primary cells for mediating ADCC, NK cells, express FcγRIII only, whereas monocytes express FcγRI, FcγRII, and FcγRIII. FcR expression on hematopoietic cells is summarized in Table 3 on page 464 of Ravetch and Kinet, Annu. Rev. Immunol. 9:457-492 (1991). Non-limiting examples of in vitro assays to assess ADCC activity of a molecule of interest is described in U.S. Pat. No. 5,500,362 (see, e.g. Hellstrom, I. et al. Proc. Nat'l Acad. Sci. USA 83:7059-7063 (1986)) and Hellstrom, I et al., Proc. Nat'l Acad. Sci. USA 82:1499-1502 (1985); 5,821,337 (see Bruggemann, M. et al., J. Exp. Med. 166:1351-1361 (1987)). Alternatively, non-radioactive assays methods may be employed (see, for example, ACTI™ non-radioactive cytotoxicity assay for flow cytometry (CellTechnology, Inc. Mountain View, CA; and CYTOTOX 96® non-radioactive cytotoxicity assay (Promega, Madison, WI). Useful effector cells for such assays include peripheral blood mononuclear cells (PBMC) and Natural Killer (NK) cells. Alternatively, or additionally, ADCC activity of the molecule of interest may be assessed in vivo, e.g., in an animal model such as that disclosed in Clynes et al. Proc. Nat'l Acad. Sci. USA 95:652-656 (1998). C1q binding assays may also be carried out to confirm that the antibody is unable to bind C1q and hence lacks CDC activity. See, e.g., C1q and C3c binding ELISA in WO 2006/029879 and WO 2005/100402. To assess complement activation, a CDC assay may be performed (see, for example, Gazzano-Santoro et al. J. Immunol. Methods 202:163 (1996); Cragg, M. S. et al. Blood. 101:1045-1052 (2003); and Cragg, M. S. and M. J. Glennie Blood. 103:2738-2743 (2004)). FcRn binding and in vivo clearance/half-life determinations can also be performed using methods known in the art (see, e.g., Petkova, S. B. et al. Int'l. Immunol. 18(12):1759-1769 (2006)).

[0158] Antibodies with reduced effector function include those with substitution of one or more of Fc region residues 238, 265, 269, 270, 297, 327 and 329 (U.S. Pat. Nos. 6,737,056 and 8,219,149). Such Fc mutants include Fc mutants with substitutions at two or more of amino acid positions 265, 269, 270, 297 and 327, including the so-called “DANA” Fc mutant with substitution of residues 265 and 297 to alanine (U.S. Pat. Nos. 7,332,581 and 8,219,149).

[0159] In certain instances, the proline at position 329 of a wild-type human Fc region in the antibody is substituted with glycine or arginine or an amino acid residue large enough to destroy the proline sandwich within the Fc/Fc.gamma receptor interface that is formed between the proline 329 of the Fc and tryptophan residues Trp 87 and Trp 110 of FcgRIII (Sondermann et al.: Nature 406, 267-273 (20 Jul. 2000)). In certain instances, the antibody comprises at least one further amino acid substitution. In one instance, the further amino acid substitution is S228P, E233P, L234A, L235A, L235E, N297A, N297D, or P331S, and still in another instance the at least one further amino acid substitution is L234A and L235A of the human IgG1 Fc region or S228P and L235E of the human IgG4 Fc region (see e.g., US 2012/0251531), and still in another instance the at least one further amino acid substitution is L234A and L235A and P329G of the human IgG1 Fc region.

[0160] In certain embodiments, alterations of the amino acid sequences of the Fc region of the antibody may alter the half-life of the antibody in the host. Certain mutations that alter binding to the neonatal Fc receptor (FcRn) may extend half-life of antibodies in serum. For example, antibodies that have tyrosine in heavy chain position 252, threonine in position 254, and glutamic acid in position 256 of the heavy chain can have dramatically extended half-life in serum (see, e.g., U.S. Pat. No. 7,083,784).

[0161] In other embodiments, Fc modifications are introduced to maximize dosing levels and to prevent anaphylaxis of peanut allergy.

[0162] In certain instances, antibodies of the invention can be altered to increase or decrease the extent to which the antibody is glycosylated. Addition or deletion of glycosylation sites to an antibody of the invention may be conveniently accomplished by altering the amino acid sequence such that one or more glycosylation sites is created or removed.

[0163] Where the antibody comprises an Fc region, the carbohydrate attached thereto may be altered. Native antibodies produced by mammalian cells typically comprise a branched, biantennary oligosaccharide that is generally attached by an N-linkage to Asn297 of the CH2 domain of the Fc region. See, e.g., Wright et al. TIBTECH 15:26-32 (1997). The oligosaccharide may include various carbohydrates, e.g., mannose, N-acetyl glucosamine (GIcNAc), galactose, and sialic acid, as well as a fucose attached to a GIcNAc in the “stem” of the biantennary oligosaccharide structure. In some instances, modifications of the oligosaccharide in an antibody of the invention are made in order to create antibody variants with certain improved properties.

[0164] In certain instances, it is desirable to create cysteine engineered anti-Ara h 2 antibodies, e.g., “thioMAbs,” in which one or more residues of an antibody are substituted with cysteine residues. In particular instances, the substituted residues occur at accessible sites of the antibody. By substituting those residues with cysteine, reactive thiol groups are thereby positioned at accessible sites of the antibody and may be used to conjugate the antibody to other moieties, such as drug moieties or linker-drug moieties, to create an immunoconjugate, as described further herein. In certain instances, any one or more of the following residues are substituted with cysteine: V205 (Kabat numbering) of the light chain; A118 (EU numbering) of the heavy chain; and S400 (EU numbering) of the heavy chain Fc region. Cysteine engineered antibodies may be generated as described, for example, in U.S. Pat. No. 7,521,541.

[0165] In certain instances, an antibody of the invention provided herein are further modified to contain additional nonproteinaceous moieties that are known in the art and readily available. The moieties suitable for derivatization of the antibody include but are not limited to water soluble polymers. Non-limiting examples of water soluble polymers include, but are not limited to, polyethylene glycol (PEG), copolymers of ethylene glycol/propylene glycol, carboxymethylcellulose, dextran, polyvinyl alcohol, polyvinyl pyrrolidone, poly-1, 3-dioxolane, poly-1,3,6-trioxane, ethylene/maleic anhydride copolymer, polyaminoacids (either homopolymers or random copolymers), and dextran or poly(n-vinyl pyrrolidone)polyethylene glycol, propropylene glycol homopolymers, prolypropylene oxide/ethylene oxide co-polymers, polyoxyethylated polyols (e.g., glycerol), polyvinyl alcohol, and mixtures thereof. Polyethylene glycol propionaldehyde may have advantages in manufacturing due to its stability in water. The polymer may be of any molecular weight, and may be branched or unbranched. The number of polymers attached to the antibody may vary, and if more than one polymer are attached, they can be the same or different molecules. In general, the number and/or type of polymers used for derivatization can be determined based on considerations including, but not limited to, the particular properties or functions of the antibody to be improved, whether the antibody derivative will be used in a therapy under defined conditions, etc.

### B. Isolation and Characterization of Human Antibodies to Ara h 2

[0166] An exemplary method for identifying anti-Ara h 2 antibodies is described in the Examples.

[0167] Sequence information for antibodies described herein can be ascertained using sequencing techniques which are well known in the art.

[0168] Similarly, affinity of the antibodies for anti-Ara h 2 antibodies can also be assessed using standard techniques. For example, Biacore 3000 can be used to determine the affinity of such antibodies. Antibodies are captured on the surface of a Biacore chip (GE healthcare), for example, via amine coupling (Sensor Chip CM5). The captured antibodies can be exposed to various concentrations of Ara h 2 in solution, and the Kₒₙ and K_{off} for an affinity (K_{D}) can be calculated, for example, by BIAevaluation software.

[0169] Antibodies can also be characterized for binding to Ara h 2 using a variety of known techniques, such as ELISA, Western blot, biolayer interferometry (BLI), etc. Generally, the antibodies are initially characterized by ELISA. Briefly, microtiter plates can be coated with purified Ara h 2 in PBS, and then blocked with irrelevant proteins such as bovine serum albumin (BSA) diluted in PBS. Dilutions of plasma are added to each well and incubated for 1-2 hours at 37° C. The plates are washed with PBS/Tween 20 and then incubated with a goat-anti-human IgG Fc-specific polyclonal reagent conjugated to alkaline phosphatase for 1 hour at 37° C. After washing, the plates are developed with ABTS substrate, and analyzed at OD of 405. In some examples, the ELISA may be an ImmunoCAP™ ELISA assay.

[0170] In other instances, competition assays may be used to identify an antibody that competes with an anti-Ara h 2 antibody for binding to Ara h 2. In certain embodiments, such a competing antibody binds to the same epitope (e.g., a linear or a conformational epitope) that is bound by an anti-Ara h 2 antibody of the invention. Detailed exemplary methods for mapping an epitope to which an antibody binds are provided in Morris (1996) “Epitope Mapping Protocols,” in Methods in Molecular Biology vol. 66 (Humana Press, Totowa, NJ).

[0171] In an exemplary competition assay, immobilized Ara h 2 is incubated in a solution comprising a first labeled antibody that binds to Ara h 2 and a second unlabeled antibody that is being tested for its ability to compete with the first antibody for binding to Ara h 2. The second antibody may be present in a hybridoma supernatant. As a control, immobilized Ara h 2 is incubated in a solution comprising the first labeled antibody but not the second unlabeled antibody. After incubation under conditions permissive for binding of the first antibody to Ara h 2, excess unbound antibody is removed, and the amount of label associated with immobilized Ara h 2 is measured. If the amount of label associated with immobilized Ara h 2 is substantially reduced in the test sample relative to the control sample, then that indicates that the second antibody is competing with the first antibody for binding to Ara h 2.

### C. Compositions

[0172] In another aspect, the invention features a pharmaceutical composition comprising a therapeutically effective amount of one or more isolated human antibodies or antigen-binding fragments thereof that specifically bind Ara h 2, together with one or more pharmaceutically acceptable excipients.

[0173] In one embodiment, the pharmaceutical composition comprises a therapeutically effective amount of two or more isolated human antibodies or antigen-binding fragments thereof that specifically bind Ara h 2 together with one or more pharmaceutically acceptable excipients.

[0174] In one embodiment, the invention features a composition, which is a combination of a therapeutically effective amount of one or more anti-Ara h 2 antibodies or antigen-binding fragments thereof of the invention, and a therapeutically effective amount of a second therapeutic agent. The second therapeutic agent may be a small molecule drug, a protein/polypeptide, an antibody, a nucleic acid molecule, such as an anti-sense molecule, or a siRNA. The second therapeutic agent may be synthetic or naturally derived.

[0175] The second therapeutic agent may be any agent that is advantageously combined with an antibody or fragment thereof of the invention, for example, a second antibody other than those described herein that is capable of blocking the binding of Ara h 2 to IgE present on mast cells or basophils. A second therapeutic agent may also be any agent that is used as standard of care in treating an allergic response to any allergen. Such second therapeutic agent may be an antihistamine, epinephrine, a decongestant, a corticosteroid, or a biologic (e.g., an anti-IgE antibody such as omalizumab (XOLAIRO)).

[0176] In certain embodiments, the second therapeutic agent may be an agent that helps to counteract or reduce any possible side effect(s) associated with the antibody or antigen-binding fragment of an antibody of the invention, if such side effect(s) should occur.

[0177] It will also be appreciated that the antibodies and pharmaceutically acceptable compositions of the present invention can be employed in combination therapies, that is, the antibodies and pharmaceutically acceptable compositions can be administered concurrently with, prior to, or subsequent to, one or more other desired therapeutics or medical procedures. The particular combination of therapies (therapeutics or procedures) to employ in a combination regimen will take into account compatibility of the desired therapeutics and/or procedures and the desired therapeutic effect to be achieved. It will also be appreciated that the therapies employed may achieve a desired effect for the same disorder (for example, an antibody may be administered concurrently with another agent used to treat the same disorder), or they may achieve different effects (e.g., control of any adverse effects). As used herein, additional therapeutic agents that are normally administered to treat or prevent a particular disease, or condition, are appropriate for the disease, or condition, being treated.

[0178] When multiple therapeutics are co-administered, dosages may be adjusted accordingly, as is recognized in the pertinent art.

[0179] Accordingly, the present invention provides a composition, e.g., a pharmaceutical composition, containing one or more (e.g., 1, 2, 3, or 4 or more) of the anti-Ara h 2 antibodies, or antibody fragments thereof, disclosed herein (e.g., in the Appendix). The antibodies, if desired, may be modified according to any of the modifications outlined above. The pharmaceutical compositions may be formulated together with a pharmaceutically acceptable carrier, excipient, or diluent. In some instances, the pharmaceutical compositions include two or more of the anti-Ara h 2 antibodies. Preferably, each of the antibodies of the composition binds to a distinct epitope of Ara h 2.

[0180] A pharmaceutical composition described herein can be administered by a variety of methods known in the art. As will be appreciated by the skilled artisan, the route and/or mode of administration will vary depending upon the desired results. The active compounds can be prepared with carriers that will protect the compound against rapid release, such as a controlled release formulation, including implants, transdermal patches, and microencapsulated delivery systems. Biodegradable, biocompatible polymers can be used, such as ethylene vinyl acetate, polyanhydrides, polyglycolic acid, collagen, polyorthoesters, and polylactic acid. Many methods for the preparation of such formulations are patented or generally known to those skilled in the art.

[0181] To administer a compound of the invention by certain routes of administration, it may be necessary to coat the compound with, or co-administer the compound with, a material to prevent its inactivation. For example, the compound may be administered to a subject in an appropriate carrier, for example, liposomes, or a diluent. Pharmaceutically acceptable diluents include saline and aqueous buffer solutions. Liposomes include water-in-oil-in-water CGF emulsions as well as conventional liposomes.

[0182] Pharmaceutically acceptable carriers include sterile aqueous solutions or dispersions and sterile powders for the extemporaneous preparation of sterile injectable solutions or dispersion. The use of such media and agents for pharmaceutically active substances is known in the art. Except insofar as any conventional media or agent is incompatible with the active compound, use thereof in the pharmaceutical compositions of the invention is contemplated. Supplementary active compounds can also be incorporated into the compositions.

[0183] Active ingredients of the pharmaceutical composition may be entrapped in microcapsules prepared, for example, by coacervation techniques or by interfacial polymerization, for example, hydroxymethylcellulose or gelatin-microcapsules and poly-(methylmethacylate) microcapsules, respectively, in colloidal drug delivery systems (for example, liposomes, albumin microspheres, microemulsions, nano-particles and nanocapsules) or in macroemulsions.

[0184] Sustained-release preparations may be prepared. Suitable examples of sustained-release preparations include semipermeable matrices of solid hydrophobic polymers containing the antibody, which matrices are in the form of shaped articles, for example, films, or microcapsules.

[0185] The formulations to be used for in vivo administration are generally sterile. Sterility may be readily accomplished, e.g., by filtration through sterile filtration membranes. Sterile injectable solutions can be prepared by incorporating the active compound in the required amount in an appropriate solvent with one or a combination of ingredients enumerated above, as required, followed by sterilization microfiltration. Generally, dispersions are prepared by incorporating the active compound into a sterile vehicle that contains a basic dispersion medium and the required other ingredients from those enumerated above. In the case of sterile powders for the preparation of sterile injectable solutions, the preferred methods of preparation are vacuum drying and freeze-drying (lyophilization) that yield a powder of the active ingredient plus any additional desired ingredient from a previously sterile-filtered solution thereof. Therapeutic compositions typically must be sterile and stable under the conditions of manufacture and storage. The composition can be formulated as a solution, microemulsion, liposome, or other ordered structure suitable to high drug concentration. The carrier can be a solvent or dispersion medium containing, for example, water, ethanol, polyol (for example, glycerol, propylene glycol, and liquid polyethylene glycol, and the like), and suitable mixtures thereof. The proper fluidity can be maintained, for example, by the use of a coating such as lecithin, by the maintenance of the required particle size in the case of dispersion and by the use of surfactants, such as TWEEN® 80. In many cases, it will be preferable to include isotonic agents, for example, sugars, polyalcohols such as mannitol, sorbitol, or sodium chloride in the composition. Prolonged absorption of the injectable compositions can be brought about by including in the composition an agent that delays absorption, for example, monostearate salts and gelatin.

[0186] Alternatively, genes encoding the anti-Ara h 2 antibodies may be delivered directly into the subject for expression rather than administering purified antibodies for prevention or therapy. For example, viral vectors, such as recombinant viruses, can be used to deliver the heavy and light chain genes. In one example, rAAV virus particles can be used to deliver anti-HIV monoclonal antibodies (Balazs et al. Nature. 481: 81, 2012). Antibody genes could also be effectively delivered by electroporation of muscle cells with plasmid DNA containing heavy and/or light chain genes (e.g., VH and/or VL genes) (Muthumani et al. Hum Vaccin Immunother. 10: 2253, 2013). Lentivirus vectors or other nucleic acids (e.g., RNA) capable of delivering transgenes could also be used to delivery antibody genes to establish serum antibody levels capable of prevention.

[0187] Also contemplated are kits including human anti-Ara h 2 antibodies and, optionally, instructions for use. The kits can further contain one or more additional reagents, such as a second, different anti-Ara h 2 antibody having a complementary activity that binds to an epitope on Ara h 2 that is distinct from the epitope to which the first anti-Ara h 2 antibody binds.

### D. Therapy

[0188] Any of the anti-Ara h 2 antibodies described herein (e.g., in the Appendix) and compositions containing the antibodies can be used in a variety of in vitro and in vivo therapeutic applications. In some embodiments, an anti-Ara h 2 antibody may be used as a monotherapy. In some embodiments, an anti-Ara h 2 antibody may be used as a combination therapy.

[0189] The invention provides an anti-Ara h 2 antibody for use as a medicament. In further aspects, an anti-Ara h 2 antibody for use in treating a peanut allergy is provided. In certain embodiments, an anti-Ara h 2 antibody for use in a method of treatment is provided. In certain embodiments, the invention provides an anti-Ara h 2 antibody for use in a method of treating an individual having a peanut allergy comprising administering to the individual an effective amount of the anti-Ara h 2 antibody. In one such embodiment, the method further comprises administering to the individual an effective amount of at least one additional therapeutic agent, for example, as described below.

[0190] The invention provides an anti-Ara h 2 antibody in the manufacture or preparation of a medicament. In a further aspect, the invention provides for the use of an anti-Ara h 2 antibody in the manufacture or preparation of a medicament. In one embodiment, the medicament is for treatment of a peanut allergy. In a further embodiment, the medicament is for use in a method of treating a peanut allergy, e.g., comprising administering to an individual having a peanut allergy an effective amount of the medicament. In one such embodiment, the method further comprises administering to the individual an effective amount of at least one additional therapeutic agent, e.g., as described below.

[0191] In a further aspect, the invention provides a method for treating a peanut allergy. In some instances, the method comprises administering the individual having such a peanut allergy an effective amount of an anti-Ara h 2 antibody. In one embodiment, the method comprises administering to an individual having such peanut allergy an effective amount of an anti-Ara h 2 antibody (e.g., any anti-Ara h 2 antibody disclosed herein). In one such embodiment, the method further comprises administering to the individual an effective amount of at least one additional therapeutic agent, as described below.

[0192] In a further aspect, the invention provides pharmaceutical formulations comprising any of the anti-Ara h 2 antibodies provided herein, e.g., for use in any of the above therapeutic methods. In one embodiment, a pharmaceutical formulation comprises any of the anti-Ara h 2 antibodies provided herein and a pharmaceutically acceptable carrier.

[0193] In a further aspect, the invention features a method of treating a subject having a peanut allergy or who is sensitized to peanuts comprising administering a therapeutically effective amount of an antibody (e.g., a human monoclonal antibody) that specifically binds to Ara h 2 or a pharmaceutical composition thereof, thereby treating the subject.

[0194] Accordingly, the invention features method for treating a patient who demonstrates a sensitivity to a peanut allergen (e.g., Ara h 2), an allergic reaction against a peanut allergen, or to Ara h 2 protein, or for treating at least one symptom or complication associated with a sensitivity to, or allergic reaction against a peanut allergen, an allergic reaction against a peanut allergen, or to Ara h 2 protein, comprising administering an effective amount of one or more isolated human monoclonal antibodies or antigen-binding fragments thereof that bind specifically to Ara h 2, e.g., in the Appendix, according to claims described herein to a patient in need thereof, wherein the sensitivity to, or an allergic reaction against, to a peanut allergen, an allergic reaction against a peanut allergen, or to Ara h 2 protein, is lessened in severity and/or duration, or at least one symptom or complication associated with the sensitivity to, or allergic reaction against, to a peanut allergen, an allergic reaction against a peanut allergen, or to Ara h 2 protein is ameliorated, or that the frequency and/or duration of, or the severity of the sensitivity to or allergic reaction against, to a peanut allergen, an allergic reaction against a peanut allergen, or to Ara h 2 protein, is reduced following administration of one or more of the isolated human monoclonal antibodies or fragments thereof that bind specifically to Ara h 2.

[0195] Preferably, the method of treatment further comprises administering an effective amount of a second therapeutic agent useful for diminishing an allergic reaction to a peanut allergen, an allergic reaction against a peanut allergen, or to Ara h 2 protein. In some instances, the second therapeutic agent is selected from the group consisting of a corticosteroid, a bronchial dilator, an antihistamine, epinephrine, or a decongestant. Typically, treatment results in a reduction in allergic rhinitis, allergic conjunctivitis, allergic asthma, or an anaphylactic response following exposure, direct or indirect, of the patient to a peanut allergen, an allergic reaction against a peanut allergen, or to Ara h 2 protein.

[0196] Furthermore, as is discussed herein, antibodies of the invention can be used either alone or in combination with other agents in a therapy. For instance, an antibody of the invention may be co-administered with at least one additional therapeutic agent (e.g., a corticosteroid, a bronchial dilator, an antihistamine, epinephrine, and/or a decongestant). Such combination therapies encompass combined administration (where two or more therapeutic agents are included in the same or separate formulations), and separate administration, in which case, administration of the antibody of the invention can occur prior to, simultaneously, and/or following, administration of the additional therapeutic agent or agents. In one embodiment, administration of the anti-Ara h 2 antibody and administration of an additional therapeutic agent occur within about one month, or within about one, two or three weeks, or within about one, two, three, four, five, or six days, of each other.

[0197] Anti-Ara h 2 antibodies described herein may also be used in combination.

[0198] An antibody, e.g., as described in the Appendix or in the claims, can be administered by any suitable means, including parenteral, intrapulmonary, intranasal, oral, mucosal, intravenous, and, if desired for local treatment, intralesional administration. Parenteral infusions include intramuscular, intravenous, intraarterial, intraperitoneal, or subcutaneous administration. In some instances, an anti-Ara h 2 antibody (e.g., any anti-Ara h 2 antibody disclosed herein) may be administered orally, intrarectally, mucosally, intravenously, intramuscularly, intradermally, transdermally, subcutaneously, percutaneously, intraarterially, intraperitoneally, intravitreally, topically, intralesionally, intraarticularly, intraprostatically, intrapleurally, intratracheally, intrathecally, intranasally, intravaginally, intratumorally, intraperitoneally, peritoneally, intraventricularly, intracranially, subconjunctivally, intravesicularly, intrapericardially, intraumbilically, intraorbitally, ocularly, intraocularly, juxtasclerally, subtenonly, superchoroidally, by inhalation, by injection, by eye drop, by implantation, by infusion, by continuous infusion, by localized perfusion bathing target cells directly, by catheter, by lavage, in cremes, or in lipid compositions. In certain instances, antibody genes (e.g., genes encoding any one or more of the anti-Ara h 2 antibodies of the invention could be administered as a gene therapy to produce the one or more anti-Ara h 2 antibodies in the subject using either DNA vectors or viral vectors (e.g., rAAV vectors). Dosing can be by any suitable route, for example, by injections, such as intravenous or subcutaneous injections, depending in part on whether the administration is brief or chronic. Various dosing schedules including but not limited to single or multiple administrations over various time-points, bolus administration, and pulse infusion are contemplated herein.

[0199] Antibodies of the invention would be formulated, dosed, and administered in a fashion consistent with good medical practice. Factors for consideration in this context include the particular disorder being treated, the particular mammal being treated, the clinical condition of the individual patient, the cause of the disorder, the site of delivery of the agent, the method of administration, the scheduling of administration, and other factors known to medical practitioners. The antibody need not be, but is optionally formulated with one or more agents currently used to prevent or treat the disorder in question. The effective amount of such other agents depends on the amount of antibody present in the formulation, the type of disorder or treatment, and other factors discussed above. These are generally used in the same dosages and with administration routes as described herein, or about from 1 to 99% of the dosages described herein, or in any dosage and by any route that is empirically/clinically determined to be appropriate.

[0200] For the prevention or treatment of a peanut allergy or a subject who is hypersensitive to peanuts, the appropriate dosage of an antibody of the invention (when used alone or in combination with one or more other additional therapeutic agents) will depend on the severity of the allergic reaction to be prevented/treated, the duration of effective antibody concentration required, the type of antibody, the severity and course of the disease, whether the antibody is administered for preventive or therapeutic purposes, previous therapy, the patient's clinical history and response to the antibody, and the discretion of the attending allergist. The antibody is suitably administered to the patient at one time or over a series of treatments. For repeated administrations over several days or longer, depending on the condition, the treatment would generally be sustained until a desired suppression of disease symptoms occurs. Doses may be administered intermittently, e.g. every week, every two weeks, every three weeks, every four weeks, every five weeks, every six weeks, every seven weeks, every eight weeks, every nine weeks, every ten weeks, every eleven weeks, or every twelve weeks (e.g., such that the patient receives from about two to about twenty, or e.g., about six doses of the antibody). For example, a dose may be administered once per month, once every two months, or once every three months (e.g., by subcutaneous injection) as an initial higher loading dose, followed by one or more lower doses may be administered. However, other dosage regimens may be useful. The progress of this therapy is easily monitored by conventional techniques and assays.

[0201] Actual dosage levels of the active ingredients in the pharmaceutical compositions of the present invention may be varied so as to obtain an amount of the active ingredient which is effective to achieve the desired therapeutic response and duration for a particular patient, composition, and mode of administration, without being toxic to the patient. The selected dosage level will depend upon a variety of pharmacokinetic factors including the activity of the particular compositions of the present invention employed, or the ester, salt or amide thereof, the route of administration, the time of administration, the rate of excretion of the particular compound being employed, the duration of the treatment, other drugs, compounds and/or materials used in combination with the particular compositions employed, the age, sex, weight, condition, general health and prior medical history of the patient being treated, and like factors well known in the medical arts. An allergist having ordinary skill in the art can readily determine and prescribe the effective amount of the pharmaceutical composition required. For example, the allergist can start doses of the compounds of the invention employed in the pharmaceutical composition at levels lower than that required in order to achieve the desired therapeutic effect and gradually increase the dosage until the desired effect is achieved. In general, a suitable daily dose of compositions of the invention will be that amount of the compound which is the lowest dose effective to produce a therapeutic effect. Such an effective dose will generally depend upon the factors described above. It is preferred that administration be intravenous, intramuscular, intraperitoneal, or subcutaneous, preferably administered proximal to the site of the target. If desired, the effective daily dose of therapeutic compositions may be administered as two, three, four, five, six or more sub-doses administered separately at appropriate intervals throughout the day, optionally, in unit dosage forms. While it is possible for a compound of the present invention to be administered alone, it is preferable to administer the compound as a pharmaceutical formulation (composition).

[0202] Therapeutic compositions can be administered with medical devices known in the art. For example, in a preferred embodiment, a therapeutic composition of the invention can be administered with a needleless hypodermic injection device, such as the devices disclosed in U.S. Pat. Nos. 5,399,163, 5,383,851, 5,312,335, 5,064,413, 4,941,880, 4,790,824, or 4,596,556. Examples of well-known implants and modules useful in the present invention include: U.S. Pat. No. 4,487,603, which discloses an implantable micro-infusion pump for dispensing medication at a controlled rate; U.S. Pat. No. 4,486,194, which discloses a therapeutic device for administering medicants through the skin; U.S. Pat. No. 4,447,233, which discloses a medication infusion pump for delivering medication at a precise infusion rate; U.S. Pat. No. 4,447,224, which discloses a variable flow implantable infusion apparatus for continuous drug delivery; U.S. Pat. No. 4,439,196, which discloses an osmotic drug delivery system having multi-chamber compartments; and U.S. Pat. No. 4,475,196, which discloses an osmotic drug delivery system. Many other such implants, delivery systems, and modules are known to those skilled in the art.

[0203] In some instances, the antibody-based therapy may be combined with an additional therapy for more efficacious treatment (e.g., additive or synergistic treatment) of the subject. Accordingly, subjects treated with antibodies of the invention can be additionally administered (prior to, simultaneously with, or following administration of a human antibody of the invention) with another therapeutic agent which enhances or augments the therapeutic effect of the human antibodies.

### E. Diagnostics

[0204] In certain embodiments, any of the anti-Ara h 2 antibodies of the invention are useful for in vitro or in vivo detection of peanut tolerance in allergic individuals. The term “detecting” as used herein encompasses quantitative or qualitative detection. In certain embodiments, a biological sample comprises a cell or tissue.

[0205] Current data suggests that there are three dominant conformational epitope bins where IgE binds to the Ara h 2 antigen and the recombinant IgG neutralizing anti Ara h 2 antibodies will compete for these sites and inhibit or displace IgE binding. With these neutralizing antibodies, the current tandem epitope binning by biolayer light interferometry assays can be used to assay whether a sample (e.g. a serum sample from a patient believed to have been exposed to a peanut allergen or a patient undergoing an OIT) contains antibodies that bind the same epitope bin, and whether those antibodies can effectively compete with the neutralizing antibodies. This test is useful to track the progress of therapy or to predict whether a patient will obtain the outcome of sustained unresponsiveness after OIT by assaying that patient's early OIT serum sample.

[0206] Accordingly, prior to the initiation of OIT, IgG antibodies isolated from patient serum will lack significant Ara h 2 neutralizing capacity and will be unable to compete with antibodies disclosed herein. During the course of treatment, patients that are responding to OIT will begin to produce IgG antibodies that are capable of competing with the anti-Ara h 2 antibodies while patients that are not responding to the therapy will maintain low levels of Ara h 2 neutralizing antibodies. The results of the competition assay can be used to predict whether an individual patient will attain a desired outcome of the treatment or can be used to adjust the duration of treatment to improve the likelihood of a desired outcome.

### F. Articles of Manufacture

[0207] In another aspect of the invention, an article of manufacture containing materials useful for the treatment, prevention and/or diagnosis of the disorders described above is provided. The article of manufacture comprises a container and a label or package insert on or associated with the container.

[0208] Suitable containers include, for example, bottles, vials, syringes, IV solution bags, etc. The containers may be formed from a variety of materials such as glass or plastic. The container holds a composition which is by itself or combined with another composition effective for treating, preventing and/or diagnosing the condition and may have a sterile access port (for example the container may be an intravenous solution bag or a vial having a stopper pierceable by a hypodermic injection needle). At least one active agent in the composition is an antibody of the invention. The label or package insert indicates that the composition is used for treating the condition of choice. Moreover, the article of manufacture may comprise (a) a first container with a composition contained therein, wherein the composition comprises an antibody of the invention; and (b) a second container with a composition contained therein, wherein the composition comprises a further cytotoxic or otherwise therapeutic agent. The article of manufacture in this embodiment of the invention may further comprise a package insert indicating that the compositions can be used to treat a particular condition. Alternatively, or additionally, the article of manufacture may further comprise a second (or third) container comprising a pharmaceutically-acceptable buffer, such as bacteriostatic water for injection (BWFI), phosphate-buffered saline, Ringer's solution and dextrose solution. It may further include other materials desirable from a commercial and user standpoint, including other buffers, diluents, filters, needles, and syringes. In some embodiments, the article of manufacture comprises an additional therapeutic agent (e.g., a corticosteroid, a bronchial dilator, an antihistamine, epinephrine, and/or a decongestant).

[0209] Other embodiments of the present invention are described in the following Examples. The present invention is further illustrated by the following examples which should not be construed as further limiting. The contents of the appendix, and all references, patents and published patent applications cited throughout this application are expressly incorporated herein by reference.

### III. EXAMPLES

### Example 1—Isolation of Genes Encoding Anti-Ara h 2 Antibodies from Patients Having Sustained Unresponsiveness to Peanut Allergen after One Month of Peanut Avoidance

[0210] The peanut-specific protective antibodies directed towards the immunodominant peanut antigen Ara h 2 were cloned from the circulation of pediatric patients who had sustained tolerance to peanut after OIT. From the same peanut OIT study, suppression of basophil activation was identified as a good biomarker of future tolerance. Furthermore, the suppression of basophils is mediated by IgG in the sera of tolerant patients, from whom Ara h 2-specific antibodies were cloned. The protective antibodies were identified as those able to outcompete non-tolerant antibodies using biolayer light interferometry, as those have better antigen blocking capabilities.

### Patient Selection

[0211] Peripheral blood was obtained after IRB-approved consent from peanut allergic participants of an open-label randomized trial of peanut OIT (NCT01324401). Study inclusion criteria included participants aged 7-21 years old with a diagnosis of peanut allergy based on a clinical history of reaction to peanut within one hour of ingestion and either an elevated skin prick test (>8 mm wheal) or elevated peanut-specific IgE (CAP FEIA>10 kU/L).

[0212] A total of 30 patients were enrolled, including 4 in an observational control arm, who were monitored for 1 year, after which they also received active OIT with premeasured peanut flour (Medium Roast, Golden Peanut Co., Alpharetta, GA). The protocol began with a 1 day modified rush before the build up phase to a 12 week maintenance phase with 4 grams of peanut protein, at the end of which desensitization was evaluated with an oral food challenge. After 4 weeks of peanut avoidance, subjects underwent a double blind oral food challenge to peanut.

[0213] Of the 22 subjects who were effectively desensitized, 9 subjects continued to have sustained unresponsiveness (SU) after a month of peanut avoidance and 13 subjects were found to have only transient desensitization (TD).

### Specific Immunoglobulin E Measurement

[0214] Measurement of antigen-specific immunoglobulin levels in the serum or plasma from peripheral blood of subjects undergoing OIT was determined using the ImmunoCAP 1000 instrument (Phadia AB) according to the manufacturer's instructions.

### Ara h 2 Specific B Cells Identification

[0215] Ara h 2 specific B cells from peripheral blood were identified by flow cytometry using a fluorescent multimer created as described by Patil et al., J. Allergy Clin Immunol. 136(1):125-134 (2015). Briefly, peripheral blood mononuclear cells (PBMCs) isolated by density gradient centrifugation (Ficoll-Paque Plus; GE Healthcare) from peripheral blood of patients undergoing peanut OIT were then stained using CD3-APC (eBioscience clone OKT3), CD14-APC (eBioscience, clone 61D3), CD16-APC (eBioscience clone CB16), CD19-APC-Cy7 (BD Biosciences clone SJ25C1), CD27-PE (BD Pharmingen clone M-T271), CD38-Violet 421 (BD Biosciences clone HIT2), IgM-PE-Cy5 (BD Pharmingen clone G20-127), and AF488-Ara h 2 multimer. Data were analyzed using FlowJo 8.8.7 software (TreeStar).

[0216] Ara h 2 specific B cells, identified as multimer⁺CD19⁺ cells were isolated 1-3 months after the start of OIT or 3-6 months after post-OIT peanut avoidance and re-ingestion for single-cell indexed fluorescence-activated cell sorting (BD Aria II, BD Fusion SORP) into 96-well plates (Eppendorf) for further single cell nested RT-PCR BCR amplification. Briefly, cells sorted into RNAsin containing single strand buffer were frozen at −80 C and subsequently underwent heat lysis with NP-40 and random hexamers. The RT reaction was followed by 2 nested PCR reactions for both heavy and light chains, as described by Patil et al., J. Allergy Clin Immunol. 136(1):125-134 (2015).

[0217] Successfully amplified products were Sanger sequenced (Genewiz Inc.) using second PCR primers. Consensus sequences combining both the forward and reverse sequences were determined using pairwise alignment in Geneious (Biomatters Ltd). These sequences were then analyzed using IMGTN-BLAST to identify germline V, D, and J sequences with the highest identity, CDR3 regions, and nucleotide and amino acid changes from germline sequence.

[0218] Purified (Qiagen PCR purification kit) paired heavy and light chains subsequently underwent a third PCR reaction for the addition of restriction enzyme sites, followed by repeat PCR purification. For expression as recombinant antibodies on an IgG1 backbone, digested heavy and light PCR amplicons were ligated into heavy and light chain vectors, respectively, as described by Patil et al., J. Allergy Clin Immunol. 136(1):125-134 (2015), and transformed in competent E. coli NEB5a bacteria (New England Biolabs) for ampicillin selection of plasmids with Sanger-sequence verified PCR amplicons. Plasmid DNA (25 ng) from selected heavy and light chains were transfected into HEK293 T cells using GenJet™ In Vitro DNA Transfection Reagent (SignaGen). Supernatants were harvested from cells after three days of culture at 37° C. with 5% CO2 in serum free HL-1 media (Lonza) supplemented with Pen-Strep and 8 mM Glutamax (Gibco). Antibodies were purified from supernatants using Protein G beads (ThermoFischer).

[0219] Recombinant Ara h 2 antibody specificity was verified by ImmunoCAP measurement for each antibody. Epitope binning was performed using SA-sensors (ForteBio) loaded with 0.5 uM concentration of biotinylated Ara h 2 (Indoor Technologies) by biolayer light interferometry (ForteBio Octet Red96). Epitope binning was performed using Octet Data Analysis Software.

[0220] In order to be expressed as monoclonal antibodies, restriction sites were added during cloning through the use of highly permissive, degenerate primers situated in the FR1 and FR4 regions, for subsequent cloning into a vector with an IgG1 constant region. As a result of both PCR error introduction rates as well as the primers required to add the requisite restriction enzyme cleavage sites, the original VDJ sequence cloned from RNA, rather than DNA, is now altered. The altered proteins are expressed as recombinant antibodies for further characterization. Furthermore, the original antibodies may have been an isotype other than IgG1 but are then artificially made into IgG1 (or any other) constant region containing antibody.

### Example 2—Antibody Binding to Ara h 2 as Determined by Surface Plasmon Resonance

[0221] Calculated equilibrium dissociative constants (K)) for antigen binding to anti-Ara h 2 antibodies was determined using a real-time surface plasmon resonance biosensor (Biacore 3000) assay. Exemplary results are shown in Table 2. BLI data are shown in FIGS. 9A-9D.

TABLE 2

| ab | KD |
|---|---|
| T1 | 4.85E−09 |
| T3 | 1.93E−10 |
| T4 | 1.43E−12 |
| T5 | 1.12E−10 |

### Example 3—Anti-Ara h 2 Antibody Epitope Characterization

[0222] The epitopes of antibodies T1, T3, T4, and T5 were characterized using biotinylated Ara h 2 by epitope binning by biolayer light interferometry (ForteBio, Octet). Experiments showed that antibodies T1 and T3 share the same epitope bin (Bin 1) and antibodies T4 and T5 share a different epitope bin (Bin 2).

### Example 4—Ara h 2 Tolerization Assay

[0223] An assay was developed to detect tolerization to the Ara h 2 antigen. The assay can be used to assess treatment response of an individual with a peanut allergy to peanut exposure. The assay may include measuring anti-Ara h 2 antibodies in a sample from a subject (e.g., a plasma sample) using a competitive assay that includes one or more anti-Ara h 2 antibodies, including any anti-Ara h 2 antibody disclosed herein (see, e.g., Example 7).

[0224] In some examples, a combination of anti-Ara h 2 antibodies is used. In some examples, the combination includes one or more anti-Ara h 2 antibodies that bind one or more of the epitope bins or linear epitopes described in Example 7 (see Table 5).

### Results

[0225] Using a bio-layer interferometry (BLI) streptavidin-sensor (Octet K2), biotinylated native Ara h 2 was loaded. The sensor was then used to bind a mix of P7, P31, P34, and S1 antibodies (each at a concentration of 1 ng/μL), followed by buffer, then tested with IgG purified from post-oral immunotherapy (OIT) patient plasma. As is shown in FIG. 1, IgG from a patient with sustained unresponsiveness (SU) or tolerance bound better than from a patient with transient desensitization (TD), or who lost tolerance after oral immunotherapy.

### Example 5—Conformational Bins of Antibodies that Bind Ara h 2 Antigen

[0226] Epitope mapping for antibodies that bind Ara h 2 antigen were performed using competitive assays, epitope mapping using chimeric antigens, and epitope mapping using biotinylated peptides.

[0227] Two antibodies from a non-tolerant subject bind the same epitope, assayed by second antibodies P34 (FIG. 2A) and P27 (FIG. 2B) against the saturating antibodies P17 (FIG. 2A) and P34 (FIG. 2B) in a tandem BLI experiment performed after loading a streptavidin sensor with biotinylated native Ara h2 (Octet K2).

[0228] A summary of the conformational bins is described in Example 7.

### Example 6—Mapping of Linear Epitopes of Antibodies that Bind Ara h 2 Antigen

[0229] Three linear epitopes of antibodies that bind Ara 2 h antigen were mapped (see also Example 7 and Table 5). FIG. 3 shows exemplary results from linear epitope mapping of the DPYSZS epitope. Using a BLI streptavidin-sensor (Octet K2), biotinylated peptide DPYSZSDPYSZS (red line) was loaded). The sensor was then used to bind a mix of P6, then P7, as labeled.

[0230] Additional data on the mapping of the three linear epitopes described in Example 7 was obtained using peptide mapping using microarrays performed by a commercial service. PT Peptide Technologies' PepStar™ peptide microarrays comprise purified synthetic peptides derived from antigens (for principle of epitope detection see FIG. 4) or other sources that are chemoselectively and covalently immobilized on the glass surface. An optimized hydrophilic linker moiety is inserted between the glass surface and the antigen derived peptide sequence to avoid false negatives caused by sterical hindrances.

### Methods and Materials

### Sequences

[0231] For the peptide mapping using microarrays experiment, the following library of 65 15-meric peptides was synthesized and immobilized on microarray slides:

TABLE 3
Peptide library

| SEQ ID NO. | Index | Peptide Sequence | Annotation |
|---|---|---|---|
| 522. | 1 | MAKLTILVALALELL | Peptide_001 |
| 523. | 2 | LTILVALALFLLAAH | Peptide_002 |
| 524. | 3 | LVALALFLLAAHASA | Peptide_003 |
| 525. | 4 | LALFLLAAHASARQQ | Peptide_004 |
| 526. | 5 | FLLAAHASARQQWEL | Peptide_005 |
| 527. | 6 | AAHASARQQWELQGD | Peptide_006 |
| 528. | 7 | ASARQQWELQGDRRC | Peptide_007 |
| 529. | 8 | RQQWELQGDRRCQSQ | Peptide_008 |
| 530. | 9 | WELQGDRRCQSQLER | Peptide_009 |
| 531. | 10 | QGDRRCQSQLERANL | Peptide_010 |
| 532. | 11 | RRCQSQLERANLRPC | Peptide_011 |
| 533. | 12 | QSQLERANLRPCEQH | Peptide_012 |
| 534. | 13 | LERANLRPCEQHLMQ | Peptide_013 |
| 535. | 14 | ANLRPCEQHLMQKIQ | Peptide_014 |
| 536. | 15 | RPCEQHLMQKIQRDE | Peptide_015 |
| 537. | 16 | EQHLMQKIQRDEDSY | Peptide_016 |
| 538. | 17 | LMQKIQRDEDSYGRD | Peptide_017 |
| 539. | 18 | KIQRDEDSYGRDPYS | Peptide_018 |
| 540. | 19 | RDEDSYGRDPYSZSQ | Peptide_019 |
| 541. | 20 | DSYGRDPYSZSQDPY | Peptide_020 |
| 542. | 21 | GRDPYSZSQDPYSZS | Peptide_021 |
| 543. | 22 | PYSZSQDPYSZSQDP | Peptide_022 |
| 544. | 23 | SQDPYSZSQDPDRR | Peptide_023 |
| 545. | 24 | DPYSZSQDPDRRDPY | Peptide_024 |
| 546. | 25 | SZSQDPDRRDPYSZS | Peptide_025 |
| 547. | 26 | QDPDRRDPYSZSPYD | Peptide_026 |
| 548. | 27 | DRRDPYSZSPYDRRG | Peptide_027 |
| 549. | 28 | DPYSZSPYDRRGAGS | Peptide_028 |
| 550. | 29 | SZSPYDRRGAGSSQH | Peptide_029 |
| 551. | 30 | PYDRRGAGSSQHQER | Peptide_030 |
| 552. | 31 | RRGAGSSQHQERCCN | Peptide_031 |
| 553. | 32 | AGSSQHQERCCNELN | Peptide_032 |
| 554. | 33 | SQHQERCCNELNEFE | Peptide_033 |
| 555. | Index | Peptide Sequence | Annotation |
| 556. | 34 | QERCCNELNEFENNQ | Peptide_034 |
| 557. | 35 | CCNELNEFENNQRCM | Peptide_035 |
| 558. | 36 | ELNEFENNQRCMCEA | Peptide_036 |
| 559. | 37 | EFENNQRCMCEALQQ | Peptide_037 |
| 560. | 38 | NNQRCMCEALQQIME | Peptide_038 |
| 561. | 39 | RCMCEALQQIMENQS | Peptide_039 |
| 562. | 40 | CEALQQIMENQSDRL | Peptide_040 |
| 563. | 41 | LQQIMENQSDRLQGR | Peptide_041 |
| 564. | 42 | IMENQSDRLQGRQQE | Peptide_042 |
| 565. | 43 | NQSDRLQGRQQEQQF | Peptide_043 |
| 566. | 44 | DRLQGROQEQQFKRE | Peptide_044 |
| 567. | 45 | QGRQQEQQFKRELRN | Peptide_045 |
| 568. | 46 | QQEQQFKRELRNLPQ | Peptide_046 |
| 569. | 47 | QQFKRELRNLPQQCG | Peptide_047 |
| 570. | 48 | KRELRNLPQQCGLRA | Peptide_048 |
| 571. | 49 | LRNLPQQCGLRAPQR | Peptide_049 |
| 572. | 50 | LPQQCGLRAPQRCDL | Peptide_050 |
| 573. | 51 | QCGLRAPQRCDLEVE | Peptide_051 |
| 574. | 52 | LRAPQRCDLEVESGG | Peptide_052 |
| 575. | 53 | PQRCDLEVESGGRDR | Peptide_053 |
| 576. | 54 | QRCDLEVESGGRDRY | Peptide_054 |
| 577. | 55 | RDEDSYGRDPYSPSQ | Peptide_055 |
| 578. | 56 | DSYGRDPYSPSQDPY | Peptide_056 |
| 579. | 57 | GRDPYSPSQDPYSPS | Peptide_057 |
| 580. | 58 | PYSPSQDPYSPSQDP | Peptide_058 |
| 581. | 59 | PSQDPYSPSQDPDRR | Peptide_059 |
| 582. | 60 | DPYSPSQDPDRRDPY | Peptide_060 |
| 583. | 61 | SPSQDPDRRDPYSPS | Peptide_061 |
| 584. | 62 | QDPDRRDPYSPSPYD | Peptide_062 |
| 585. | 63 | DRRDPYSPSPYDRRG | Peptide_063 |
| 586. | 64 | DPYSPSPYDRRGAGS | Peptide_064 |
| 587. | 65 | SPSPYDRRGAGSSQH | Peptide_065 |

[0232] Full-length human IgG, human IgE and mouse IgG were co-immobilized on microarray slides as assay controls.

### Assay Conditions

[0233] The peptide mapping using microarrays was performed with 40 antibody samples diluted 1:1000 in blocking buffer (see below). Sample dilutions were incubated for 1 hour at 30° C. on multiwell microarray slides. The slides contained 21 individual mini-arrays (1 mini-array per sample dilution).

[0234] Subsequent to sample incubation, secondary fluorescently labeled anti-human-IgG antibody at 1 μg/ml was added into the corresponding wells and left to react for 1 hour.

[0235] Additional control incubations applying the secondary antibody only was performed in parallel on the microarray slides to assess false-positive binding to peptides.

[0236] After washing and drying, the slides were scanned with a high-resolution laser scanner at 635 nm to obtain fluorescence intensity profiles. Resulting images were quantified to yield a mean pixel value for each peptide.

### Samples

[0237] The following samples in Table 4 were used for antibody profiling:

TABLE 4

| | Applied |
|---|---|
| | sample |
| Samples: | dilution |

| | | |
|---|---|---|
| 1 | P6 | 1:1000 |
| 2 | P7 | 1:1000 |
| 3 | 111BU7P1A12 | 1:1000 |
| 4 | 111BU7P1D2 | 1:1000 |
| 5 | T6 | 1:1000 |
| 6 | 24BU7P1D4 | 1:1000 |
| 7 | 105BU7P1D6 | 1:1000 |
| 8 | 105BU7P1D8 | 1:1000 |
| 9 | 111BU7P1D5 | 1:1000 |
| 10 | 23FU1P1D8 | Sample not |
| | | available |
| 11 | 13FU1P1A4 | 1:1000 |
| 12 | 13FU1P2B12 | 1:1000 |
| 13 | P34 | 1:1000 |
| 14 | T1 | 1:1000 |
| 15 | T3 | 1:1000 |
| 16 | T4 | 1:1000 |
| 17 | T5 | 1:1000 |
| 18 | P31 | 1:1000 |
| 19 | 13FU1P2B10 | 1:1000 |
| 20 | 27FU1P3A10 | 1:1000 |
| 21 | 14FU1P1D6 | 1:1000 |
| 22 | S4 | 1:1000 |
| 23 | S1 | 1:1000 |
| 24 | 27FU1P3A4 | 1:1000 |
| 25 | P22 | 1:1000 |
| 26 | P8 | 1:1000 |
| 27 | 24BU7P1D3 | 1:1000 |
| 28 | 6BU4P2B1 | 1:1000 |
| 29 | 23FU1P1C10 | 1:1000 |
| 30 | 15FU1P3A1 | 1:1000 |
| 31 | 15FU1P3A6 | 1:1000 |
| 32 | 24BU7P1B1 | 1:1000 |
| 33 | P16 | 1:1000 |

[0238] The secondary antibody 1 was anti human IgG (H+L) (Jackson Immunoresearch 109-605-098). The label was ALEXA® Fluor 647. The applied concentration of secondary antibody was 1 μg/mL.

### Buffers and Solutions

[0239] 50 mM TBS-buffer including 0.1% TWEEN® 20 (JPT), pH 7.2
[0240] Blocking buffer (Pierce International, Superblock TBS T20)

### Hardware and Software

[0241] Peptide microarrays (JPT Peptide Technologies GmbH, Berlin, Germany; batch #3399)
[0242] Axon Genepix Scanner 4300 SL50
[0243] Spot-recognition software GenePix
[0244] Microsoft Excel, R

### Assay

[0245] The assay was performed using a Multiwell incubation chamber.
[0246] Samples were diluted in blocking buffer
[0247] Diluted samples were applied to microarrays for 1 h at 30° C.
[0248] Microarrays were incubated with secondary antibody diluted in blocking buffer for 1 h at 30° C.
[0249] Microarrays were dried.

[0250] Before each step, microarrays were washed with washing buffer.

### Quantification

[0251] Microarrays were scanned using a high resolution fluorescence scanner. Laser settings and applied resolution were identical for all performed measurements. The resulting images were analyzed und quantified using spot-recognition software GenePix (Molecular Devices). For each spot, the mean signal intensity was extracted (between 0 and 65535 arbitrary units).

[0252] For further data evaluation, the MMC2 values were determined. The MMC2 equals the mean value of all three instances on the microarray except when the coefficient of variation (CV)—standard-deviation divided by the mean value—is larger 0.5. In this case the mean of the two closest values (MC2) is assigned to MMC2.

### Results and Data Evaluation

[0253] An example of a fluorescence readout image of one mini-array reflecting typical microarray incubation is shown in FIG. 5. Only low background levels were observed for all sample dilutions.

[0254] To visualize obtained results and to compare binding regions across the individual incubations, a heatmap diagram (FIG. 6) was computed showing fluorescence intensities in a color-coded manner from white (no binding) to red (strong binding). For all evaluations the MMC2-value of the mean pixel intensity for each peptide was calculated (please refer to paragraph 6.5 for details of calculation). The thick black line on the heatmap in FIG. 6 separates control incubations applying anti-human-IgG secondary antibody only.

[0255] The obtained heatmap revealed a highly significant binding of P6, 111BU7P1A12, 111BU7P1D2, 111BU7P1D5, 24BU7P1D3, 24BU7P1B1 and a weak binding of P7 to the peptides shown in FIG. 7A. Overlapping peptides 19-28 contain a common motif “DPYSZS” which may represent a specific minimal epitope of the antibodies. Interestingly, in addition to peptides 19-28, samples 24BU7P1D3 and 24BU7P1B1 demonstrated a strong binding also to peptide 18. This suggests that both antibodies recognize even a shorter epitope “DPYS.” Motif “DPYS” is also present in peptides 55-64 as shown in FIG. 7B.

[0256] All antibodies described above bind to these peptides though to different extents. Antibodies T6, 24BU7P1D4, 23FU1P1C10 and 15FU1P3A1 demonstrated another common interaction profile comprising peptides 9-12, as shown in FIG. 8A. These peptides share the common binding motif “QSQLER”. Besides, signals of different intensity were measured for antibodies 105BU7P1D6 and 105BU7P1D8 with peptides 44-45, as shown in FIG. 8B, and or antibodies P22, P8 and P16 with peptides 46-48, as shown in FIG. 8C.

[0257] All remaining antibody samples showed no significant binding to the peptide library immobilized on the microarray.

[0258] Highly significant signals were obtained at control spots containing full-length human IgG demonstrating a good assay performance.

[0259] All control incubations containing detection antibody alone revealed no unspecific interactions with peptides.

### Summary

[0260] Antibodies P6, 111BU7P1A12, 111BU7P1D2, 111BU7P1D5 showed a highly significant interaction with overlapping peptides 19-28 representing the epitope “DPYSZS.”

[0261] Samples 24BU7P1D3 and 24BU7P1B1 showed a strong interaction with the common motif “DPYS' present in peptides 18-28 and 55-64.

[0262] Antibodies T6, 24BU7P1D4, 23FU1P1C10 and 15FU1P3A1 demonstrated a strong binding to peptides 9-12 which comprised a common motif “QSQLER.”

[0263] Only weak interactions were detected in the control incubation containing secondary antibody only.

[0264] Highly significant signals were obtained at control spots containing full-length human IgG demonstrating a good assay performance.

### Example 7—Summary of Arm h 2 Conformational Epitope Bins and Linear Epitopes Bound by Selected Anti-Arm h 2 Antibodies

[0265] Table 5 shows a summary of Aa h 2 epitope bins and linear epitopes bound by selected anti-Ara h 2 antibodies. The numbering of Ara h 2 residues is relative to the numbering in SEQ ID NO: 441:

MAKLTILVALALFLLAAHASARQQWELQGDRRCQSQLERANLRPCEQHLM
QKIQRDEDSYGRDPYSPSQDPYSPSQDPDRRDPYSPSPYDRRGAGSSQHQ
ERCCNELNEFENNQRCMCEALQQIMENQSDRLQGRQQEQQFKRELRNLPQ
QCGLRAPQRCDLEVESGGRDRY.

TABLE 5

| Antibody | Bin/Linear Epitope | Ara h 2 residues |
|---|---|---|
| P3 | 1 | 33-56, 114-132 |
| P6 | DPYSZS | 63-75 |
| P7 | DPYSZS | 63-75 |
| P8 | KRELRNLPQ | 142-150 |
| P10 | 1 | 33-56, 114-132 |
| P11 | 1 | 33-56, 114-132 |
| P13 | 1 | 33-56, 114-132 |
| P14 | 1 | 33-56, 114-132 |
| P16 | KRELRNLPQ | 142-150 |
| P17 | 1 | 33-56, 114-132 |
| P19 | 1 | 33-56, 114-132 |
| P22 | KRELRNLPQ | 142-150 |
| P21 | 1 | 33-56, 114-132 |
| P28 | 1 | 33-56, 114-132 |
| P30 | 1 | 33-56, 114-132 |
| P31 | 2 | 57-111 |
| P33 | 1 | 33-56, 114-132 |
| P34 | 1 | 33-56, 114-132 |
| P39 | 1 | 33-56, 114-132 |
| S1 | 3 | 34, 37-46, 119, 123-128 |
| S4 | 2 | 57-111 |
| 24B7D4 | QSQLER | 34-39 |

### Example 8—Ara h 2 Epitope Recognition by High Affinity Antibodies

[0266] Additional studies to evaluate Ara h 2 epitope recognition by high affinity antibodies were performed.

[0267] FIG. 9A shows a representative grid of conformational Ara h 2 epitopes as determined by BLI. Average nm increase of binding antibodies was 0.77 nm (standard deviation (SD)=0.25) and non-binding antibodies was 0.04 (SD 0.05). FIG. 9B shows an inset of experimental results from the experiments summarized in FIG. 9A. Secondary antibodies were grouped into a separate epitope if binding was ≥0.3 nm (≥6× the SD of non-binding antibodies). Three distinct conformational epitopes, Bin 1, 2, and 3, were identified using this method.

[0268] FIG. 9C shows a map of cloned monoclonal antibodies (SU Ab=36; TD Ab=44) from both SU and TD patients (n=9 and n=10 respectively). The majority (SU=56%; TD=48%) of antibodies bound to the Bin 1 epitope and antibodies from all three conformational bins were found in both groups.

[0269] FIG. 9D shows BLI results showing simultaneous binding of three monoclonal antibodies, one from each conformational bin and the linear DPYSP^{OH}S epitope. The DPYSP^{OH}S epitope is the same as DPYSZS. The “—OH” refers to a hydroxylproline important in binding.

### Example 9—Additional Summary of Ara h 2 Conformational Epitope Bins and Linear Epitopes Bound by Selected Anti-Ara h 2 Antibodies

[0270] Table 6 shows a summary of Ara h 2 epitope bins and linear epitopes bound by selected anti-Ara h 2 antibodies. Table 6 shows the clone name, epitope bin, chain, and patient outcome (i.e., non-tolerant or tolerant). For Bin 1 antibodies, Table 6 also shows whether the antibody belongs in a special sub-bin of Bin 1 which is only found in tolerant individuals. In general, antibodies that are indicated as being non-tolerant are particularly useful for diagnostic assays, while antibodies indicated as being tolerant are particularly useful as therapeutic antibodies. The right-hand column of Table 6 identifies antibodies that are expected to be especially advantageous as therapeutic antibodies.

[0271] It is to be understood that the antibodies disclosed herein can be reformatted into other antibody chains, e.g., IgG (e.g., IgG1, IgG2, IgG3, or IgG4), IgD, IgE, IgA, or IgM.

TABLE 6

| | | | | | Espe- |
|---|---|---|---|---|---|
| | | | | | cially |
| | | | | | Advan- |
| | | | | | tageous |
| Clone | Epitope | | | Bin1 | Thera- |
| Name | Bin | Chain | Outcome | SubBin | peutic |
| 22BU2S1 | Bin3 | IgH | non-tolerant | | |
| 22BU2S4 | Bin2 | IgH | non-tolerant | | |
| 21BU2U1 | Bin1 | IgH | non-tolerant | | |
| 23BU2P3 | Bin1 | IgH | non-tolerant | | |
| 23BU2P6 | DPYSZS | IgH | non-tolerant | | Yes |
| 23BU2P7 | DPYSZS | IgH | non-tolerant | | Yes |
| 23BU2P8 | KRELRNLPQ | IgH | non-tolerant | | Yes |
| 23BU2P10 | Bin1 | IgH | non-tolerant | | |
| 23BU2P11 | Bin1 | IgH | non-tolerant | | |
| 23BU2P13 | Bin1 | IgH | non-tolerant | | |
| 23BU2P14 | Bin1 | IgH | non-tolerant | | |
| 23BU2P16 | KRELRNLPQ | IgH | non-tolerant | | Yes |
| 23BU2P17 | Bin1 | IgH | non-tolerant | | |
| 23BU2P19 | Bin1 | IgH | non-tolerant | | |
| 23BU2P21 | Bin1 | IgH | non-tolerant | | |
| 23BU2P22 | KRELRNLPQ | IgH | non-tolerant | | Yes |
| 23BU2P30 | Bin1 | IgH | non-tolerant | | |
| 23BU2P31 | Bin2 | IgH | non-tolerant | | |
| 23BU2P33 | Bin1 | IgH | non-tolerant | | |
| 23BU2P34 | Bin1 | IgH | non-tolerant | | |
| 23BU2P39 | Bin1 | IgH | non-tolerant | | |
| 13BU2T1 | Bin1 | IgH | tolerant | Yes | Yes |
| 13BU2T3 | Bin1 | IgH | tolerant | | Yes |
| 13BU2T4 | Bin2 | IgH | tolerant | | Yes |
| 13BU2T5 | Bin2 | IgH | tolerant | | Yes |
| 13BU2T6 | QSQLER | IgH | tolerant | | |
| 13FU1P1A4 | Bin1 | IgH | tolerant | Yes | Yes |
| 13FU1P1B4 | Bin1 | IgH | tolerant | Yes | Yes |
| 14FU2P1A11 | Bin1 | IgH | tolerant | | |
| 14FU2P1D6 | Bin2 | IgH | tolerant | | |
| 15FU1P1A3 | Bin1 | IgH | tolerant | | |
| 15FU1P3A1 | QSQLER | IgH | tolerant | | Yes |
| 15FU1P3A6 | Bin2 | IgH | tolerant | | |
| 13FU1P2B10 | Bin2 | IgH | tolerant | | Yes |
| 13FU1P2B12 | Bin1 | IgH | tolerant | | Yes |
| 27FU1P3A4 | Bin3 | IgH | tolerant | | |
| 27FU1P3A10 | Bin2 | IgH | tolerant | | |
| 6BU4P2B1 | Bin3 | IgH | tolerant | | Yes |
| 11FUP1A2 | Bin1 | IgH | non-tolerant | | |
| 18FU1P1A7 | Bin1 | IgH | non-tolerant | | |
| 23FUP1A8 | Bin1 | IgH | non-tolerant | | |
| 23FUP1B8 | Bin1 | IgH | non-tolerant | | |
| 23FUP1C4 | Bin1 | IgH | non-tolerant | | |
| 23FUP1C10 | QSQLER | IgH | non-tolerant | | |
| 23FUP1D6 | Bin1 | IgH | non-tolerant | | |
| 23FUP1D8 | QSQLER | IgH | non-tolerant | | |
| 23FUP1D12 | Bin1 | IgH | non-tolerant | | |
| 24BU7P1A10 | Bin1 | IgH | tolerant | | |
| 24BU7P1B6 | Bin1 | IgH | tolerant | | |
| 24BU7P1D1 | Bin1 | IgH | tolerant | | |
| 24BU7P1D4 | QSQLER | IgH | tolerant | | Yes |
| 24BU7P1C10 | Bin1 | IgH | tolerant | | |
| 24BU7P1D3 | DPYS | IgH | tolerant | | |
| 24BU7P1D9 | Bin1 | IgH | tolerant | | |
| 24BU7P1B1 | DPYS | IgH | tolerant | | Yes |
| 24BU7P1C2 | Bin1 | IgH | tolerant | | |
| 105BU7P1A11 | Bin1 | IgH | tolerant | | |
| 105BU7P1C3 | Bin1 | IgH | tolerant | Yes | |
| 105BU7P1D6 | QGRQQEQQF | IgH | tolerant | | Yes |
| 105BU7P1D7 | Bin1 | IgH | tolerant | | |
| 105BU7P1D8 | QGRQQEQQF | IgH | tolerant | | Yes |
| 105BU7P1D12 | Bin1 | IgH | tolerant | Yes | |
| 111BU7P1A12 | DPYSZS | IgH | tolerant | | Yes |
| 111BU7P1D2 | DPYSZS | IgH | tolerant | | Yes |
| 111BU7P1D5 | DPYSZS | IgH | tolerant | | Yes |
| 33BU7P1D11 | Bin1 | IgH | non-tolerant | | |
| 89BU7P1B10 | Bin3 | IgH | non-tolerant | | |
| 29BU7P1D1 | CEALQQ | IgH | non-tolerant | | Yes |

[0272] Table 7 shows a table listing alternative nomenclature for certain antibodies disclosed herein. The “alternative clone names” represent alternative names for the same antibody. For example, “P3” is the same antibody as “23BU2P3.”

TABLE 7

| Clone | Alternative |
|---|---|
| Name | Clone Name |
| P3 | 23BU2P3 |
| P6 | 23BU2P6 |
| P7 | 23BU2P7 |
| P8 | 23BU2P8 |
| P10 | 23BU2P10 |
| P11 | 23BU2P11 |
| P13 | 23BU2P13 |
| P14 | 23BU2P14 |
| P16 | 23BU2P16 |
| P17 | 23BU2P17 |
| P19 | 23BU2P19 |
| P21 | 23BU2P21 |
| P22 | 23BU2P22 |
| P28 | 23BU2P28 |
| P30 | 23BU2P30 |
| P31 | 23BU2P31 |
| P33 | 23BU2P33 |
| P34 | 23BU2P34 |
| P39 | 23BU2P39 |
| S1 | 22BU2S1 |
| S4 | 22BU2S4 |

[0273] Therefore, the present disclosure provides anti-Ara h 2 antibodies and combinations thereof useful for diagnostic and therapeutic purposes, e.g., for diagnosis and treatment of peanut allergy.

[0274] Table 8 below provides the sequences of the above-mentioned antibodies, peptides, and Ara h 2. For polypeptide sequences, X is any natural occurring amino acid. For nucleotide sequences n is A, T, G, C or U.

TABLE 8

| SEQ ID NO | | P3 |
|---|---|---|
| 1. | CDR-H1 | GFIFADYT |
| 2. | CDR-H2 | ISWNSGGV |
| 3. | CDR-H3 | VKDNGYRAFDL |
| 4. | CDR-L1 | QSLVHSNGYNY |
| 5. | CDR-L2 | MGS |
| 6. | CDR-L3 | MQSLQTWT |
| 7. | VH | QVQLVESGGGLVQPGRSLRLSCAASGFIFADYTMHWVRQSPG |
| | | KDLEWVSRISWNSGGVEYADSVKGRFTISRDNAKNSLYLQMNS |
| | | LRVEDTALYYCVKDNGYRAFDLWGLGTMVTVSS |
| 8. | VL | DVVMTQSPVSLPVTPGEPASISCRSSQSLVHSNGYNYLDWYLQ |
| | | KPGQSPQLLIYMGSNRASGVPDRFSGSGSGTDFTLKISRVEAED |
| | | VGVYYCMQSLQTWTFGQGTKVEIK |
| 9. | FR-H1 | [sequence omitted] |
| 10. | FR-H2 | MHWVRQSPGKDLEWVSR |
| 11. | FR-H3 | EYADSVKGRFTISRDNAKNSLYLQMNSLRVEDTALYYC |
| 12. | FR-H4 | WGLGTMVTVSS |
| 13. | FR-L1 | DVVMTQSPVSLPVTPGEPASISCRSS |
| 14. | FR-L2 | LDWYLQKPGQSPQLLIY |
| 15. | FR-L3 | NRASGVPDRFSGSGSGTDFTLKISRVEAEDVGVYYC |
| 16. | FR-L4 | FGQGTKVEIK |
| 17. | heavychain | QVQLVESGGGLVQPGRSLRLSCAASGFIFADYTMHWVRQSPG |
| | | KDLEWVSRISWNSGGVEYADSVKGRFTISRDNAKNSLYLQMNS |
| | | LRVEDTALYYCVKDNGYRAFDLWGLGTMVTVSSKGPSVFPLAP |
| | | SSKSTSGGTAALGXLVKDYFPEPVTVSWNSGALTSGVHTFPAVL |
| | | QSSGLYSLSSVVTVPSSSLGTQTYICNVNHKPSNTKVDKXVEPK |
| | | SCDKTHTCPPCPAPELLGGPSVFLFPPKPKDTLMISRTPEVTCV |
| | | VVDVSHEDPEVKFNWYVDGVEVHNAKTKPREEQYNSTYRVVS |
| | | VLTVLHQDWLNGKEYKCKVSNKALPAPIEKTISKAKGQPREPQV |
| | | YTLPPSRDEXTKNQVSLTCLVKGFYPSDIAVEWESNGQPENNY |
| | | KTTPPVLDSDGSFFLYSKLTVDKSRWQQGNVFSCSVMHEALHN |
| | | HYTQKSLSLSPGK |
| 18. | lightchain | DVVMTQSPVSLPVTPGEPASISCRSSQSLVHSNGYNYLDWYLQ |
| | | KPGQSPQLLIYMGSNRASGVPDRFSGSGSGTDFTLKISRVEAED |
| | | VGVYYCMQSLQTWTFGQGTKVEIKAPSVFIFPPSDEQLKSGTAS |
| | | VVCLLNNFYPREAKVQWKVDNALQSGNSQESVTEQDSKDSTYS |
| | | LSSTLTLSKADYEKHKVYACEVTHQGLSSPVTKSFNRGEC*K |
| 19. | VH_nuc | caggtgcagctggtggagtctgggggaggcttggtacaacctggcaggtccctgagactc |
| | | tcctgtgcagcctctggattcatttttgccgattataccatgcactgggtccggcaaagtccag |
| | | ggaaggacctggagtgggtctctagaattagttggaatagtgggggcgtagagtatgcgg |
| | | actctgtgaagggccgattcaccatctccagagacaacgccaagaactccctctatcttca |
| | | aatgaacagtctgagagttgaagacacggccttatattactgtgtaaaagataatggttatc |
| | | gtgcatttgatctttggggcctagggacaatggtcaccgtctcttcag |
| 20. | VL_nuc | gatgttgtgatgactcagtctccagtctccctgcccgtcacccctggagagccggcctccatc |
| | | tcctgcaggtctagtcagagcctcgtgcatagtaatggatacaactatttggattggtacctgc |
| | | agaagccagggcagtctccacagctcctgatctatatgggttcaaatcgggcctccggggt |
| | | ccctgacaggttcagtggcagtggatcaggcacagattttacactgaaaatcagcagagt |
| | | ggaggctgaggatgttggagtttattactgcatgcaaagtctacaaacgtggacgttcggcc |
| | | aagggaccaaggtggaaatcaaac |
| SEQ ID NO | | P6 |
| 21. | CDR-H1 | GFSFEDYG |
| 22. | CDR-H2 | INWNGQST |
| 23. | CDR-H3 | ARVGRGVTGGGIRAFDI |
| 24. | CDR-L1 | QSISSDY |
| 25. | CDR-L2 | GAS |
| 26. | CDR-L3 | QKYSNSPVIT |
| 27. | VH | XVQLVESGGSLVRPGGSVRLSCTASGFSFEDYGMTWVRQGPG |
| | | MGLEWVSGINWNGQSTGYTDSVKGRFTISRDDAKNSLHLQMN |
| | | NLRVEDTALYYCARVGRGVTGGGIRAFDIWGQGTMVTVSP |
| 28. | VL | EIXXTQSPGTLSMSPGERATLSCRASQSISSDYLAWYQHKPGQ |
| | | APRLLIYGASSRATGIPDRFSGSGSGTDFTLTISRLEPEDFAVYY |
| | | CQKYSNSPVITFGQGTRLEIK |
| 29. | FR-H1 | XVQLVESGGSLVRPGGSVRLSCTAS |
| 30. | FR-H2 | MTWVRQGPGMGLEWVSG |
| 31. | FR-H3 | GYTDSVKGRFTISRDDAKNSLHLQMNNLRVEDTALYYC |
| 32. | FR-H4 | WGQGTMVTVSP |
| 33. | FR-L1 | EIXXTQSPGTLSMSPGERATLSCRAS |
| 34. | FR-L2 | LAWYQHKPGQAPRLLIY |
| 35. | FR-L3 | [sequence omitted] |
| 36. | FR-L4 | FGQGTRLEIK |
| 37. | heavychain | XVQLVESGGSLVRPGGSVRLSCTASGFSFEDYGMTWVRQGPG |
| | | MGLEWVSGINWNGQSTGYTDSVKGRFTISRDDAKNSLHLQMN |
| | | NLRVEDTALYYCARVGRGVTGGGIRAFDIWGQGTMVTVSPKGP |
| | | SVFPLAPSSKSTSGGTAALGXLVKDYFPEPVTVSWNSGALTSGV |
| | | HTFPAVLQSSGLYSLSSVVTVPSSSLGTQTYICNVNHKPSNTKV |
| | | DKXVEPKSCDKTHTCPPCPAPELLGGPSVFLFPPKPKDTLMISR |
| | | TPEVTCVVVDVSHEDPEVKFNWYVDGVEVHNAKTKPREEQYNS |
| | | TYRVVSVLTVLHQDWLNGKEYKCKVSNKALPAPIEKTISKAKGQ |
| | | PREPQVYTLPPSRDEXTKNQVSLTCLVKGFYPSDIAVEWESNG |
| | | QPENNYKTTPPVLDSDGSFFLYSKLTVDKSRWQQGNVFSCSVM |
| | | HEALHNHYTQKSLSLSPGK |
| 38. | lightchain | EIXLTQSPATLSLSPGERATLSCRASQSLGNYLAWYQQKPGQAP |
| | | RLLIYDASDRATGIPARFSGSGSGTDFTLTISSLEPEDFAVYYCQ |
| | | QRSQFMWTFGQGTKVEIKAPSVFIFPPSDEQLKSGTASVVCLLN |
| | | NFYPREAKVQWKVDNALQSGNSQESVTEQDSKDSTYSLSSTLT |
| | | LSKADYEKHKVYACEVTHQGLSSPVTKSFNRGEC*K |
| 39. | VH_nuc | nnngtgcagctggtggagtcggggggaagtttggtacggccgggggggtccgtgagact |
| | | ctcctgtacagcctctggatttagttttgaagactatggcatgacctgggtccgccaaggtcc |
| | | agggatggggctggagtgggtctccggtattaattggaatggtcagagtacaggttacaca |
| | | gactctgtgaagggccgattcaccatctccagagacgacgccaagaactccctgcatcta |
| | | caaatgaacaatctgagagtcgaggatacggccctatattattgtgcgagagtagggagg |
| | | ggagttactggcgggggaatcagggcttttgacatctggggccaagggacaatggtcacc |
| | | gtctctccag |
| 40. | VL_nuc | gaaattgngttgacgcagtctccagccaccctgtctttgtctccaggggaaagagccactct |
| | | ctcctgcagggccagtcagagtcttggcaactacttagcctggtaccaacagaaacctggc |
| | | caggctcccaggctcctcatctatgatgcatccgaccgggccactggcatcccagccaggt |
| | | tcagtggcagtgggtctgggacagacttcactctcaccatcagcagccttgagcctgaaga |
| | | ttttgcagtttattactgtcagcagcgtagccaatttatgtggacgttcggccaagggaccaa |
| | | ggtggaaatcaaac |
| SEQ ID NO | | P7 |
| 41. | CDR-H1 | GFTFTRYA |
| 42. | CDR-H2 | ISHDGGTK |
| 43. | CDR-H3 | AKTCSSPSCYDTAYYFDY |
| 44. | CDR-L1 | QSLGNY |
| 45. | CDR-L2 | DAS |
| 46. | CDR-L3 | QQRSQFMWT |
| 47. | VH | QVQLVESGGGVVQPGRSLRLSCVVSGFTFTRYAFHWVRQAPG |
| | | KGLEWVAVISHDGGTKNYADSVEGRFTISRDNSESALYLQMNSL |
| | | RPEDTAIYYCAKTCSSPSCYDTAYYFDYWGQGTPVTVSS |
| 48. | VL | EIXLTQSPATLSLSPGERATLSCRASQSLGNYLAWYQQKPGQAP |
| | | RLLIYDASDRATGIPARFSGSGSGTDFTLTISSLEPEDFAVYYCQ |
| | | QRSQFMWTFGQGTKVEIK |
| 49. | FR-H1 | QVQLVESGGGVVQPGRSLRLSCVVS |
| 50. | FR-H2 | FHWVRQAPGKGLEWVAV |
| 51. | FR-H3 | NYADSVEGRFTISRDNSESALYLQMNSLRPEDTAIYYC |
| 52. | FR-H4 | WGQGTPVTVSS |
| 53. | FR-L1 | EIXLTQSPATLSLSPGERATLSCRAS |
| 54. | FR-L2 | LAWYQQKPGQAPRLLIY |
| 55. | FR-L3 | DRATGIPARFSGSGSGTDFTLTISSLEPEDFAVYYC |
| 56. | FR-L4 | FGQGTKVEIK |
| 57. | heavychain | QVQLVESGGGVVQPGRSLRLSCVVSGFTFTRYAFHWVRQAPG |
| | | KGLEWVAVISHDGGTKNYADSVEGRFTISRDNSESALYLQMNSL |
| | | RPEDTAIYYCAKTCSSPSCYDTAYYFDYWGQGTPVTVSSKGPS |
| | | VFPLAPSSKSTSGGTAALGXLVKDYFPEPVTVSWNSGALTSGV |
| | | HTFPAVLQSSGLYSLSSVVTVPSSSLGTQTYICNVNHKPSNTKV |
| | | DKXVEPKSCDKTHTCPPCPAPELLGGPSVFLFPPKPKDTLMISR |
| | | TPEVTCVVVDVSHEDPEVKFNWYVDGVEVHNAKTKPREEQYNS |
| | | TYRVVSVLTVLHQDWLNGKEYKCKVSNKALPAPIEKTISKAKGQ |
| | | PREPQVYTLPPSRDEXTKNQVSLTCLVKGFYPSDIAVEWESNG |
| | | QPENNYKTTPPVLDSDGSFFLYSKLTVDKSRWQQGNVFSCSVM |
| | | HEALHNHYTQKSLSLSPGK |
| 58. | lightchain | EIXXTQSPGTLSLSPGERATLSCTASQRVNSDSVAWYQQRPGL |
| | | APRLLIYDASHRATGIPDRFSGGRGGTGFTLTIRALEPEDFAVYY |
| | | CQQYGESPLTFGQGTKVEIKAPSVFIFPPSDEQLKSGTASVVCLL |
| | | NNFYPREAKVQWKVDNALQSGNSQESVTEQDSKDSTYSLSSTL |
| | | TLSKADYEKHKVYACEVTHQGLSSPVTKSFNRGEC*K |
| 59. | VH_nuc | caggtgcagctggtggagtctgggggaggcgtggtccagcctgggaggtccctgagact |
| | | ctcctgtgtagtctctggattcaccttcactaggtatgcttttcactgggtccgccaggctccag |
| | | gcaaggggctggagtgggtggcagttatatcacatgatggaggcactaaaaactacgca |
| | | gactccgtggagggccgattcaccatctccagagacaattccgagagcgcactctatctgc |
| | | aaatgaacagcctgagacctgaggacacggctatatattactgtgcgaaaacttgtagtag |
| | | tcccagttgttatgatacggcatactactttgactactggggccagggaaccccggtcaccg |
| | | tctcctcag |
| 60. | VL_nuc | gaaatagngtngacgcagtctccaggcaccctgtctttgtctccaggcgagagggccacc |
| | | ctctcctgcacggccagtcagagagtgaatagcgactccgtagcctggtatcagcagaga |
| | | cctggcctggcgcccaggctcctcatctatgatgcatcccacagggccactggcatcccag |
| | | acaggttcagtggcggtaggggtgggacaggcttcactctcaccatcagggcactggagc |
| | | ctgaagattttgcagtatattactgtcaacagtatggtgagtcacctctaacgttcggccaag |
| | | ggaccaaggtggaaatcaaac |
| SEQ ID NO | | P8 |
| 61. | CDR-H1 | GFSFTGSA |
| 62. | CDR-H2 | VQSYSHSFAT |
| 63. | CDR-H3 | TRPFSGYDLMSDFFPN |
| 64. | CDR-L1 | QRVNSDS |
| 65. | CDR-L2 | DAS |
| 66. | CDR-L3 | QQYGESPLT |
| 67. | VH | XCXLVESGGDLVQPGGSLKLSCATSGFSFTGSAIHWVRQSSGK |
| | | GLEWLGRVQSYSHSFATAYSASLEGRFTISRDESENTAYLQMN |
| | | SLKPEDTAVYYCTRPFSGYDLMSDFFPNWGQGTLVTVSS |
| 68. | VL | EIXXTQSPGTLSLSPGERATLSCTASQRVNSDSVAWYQQRPGL |
| | | APRLLIYDASHRATGIPDRFSGGRGGTGFTLTIRALEPEDFAVYY |
| | | CQQYGESPLTFGQGTKVEIK |
| 69. | FR-H1 | XCXLVESGGDLVQPGGSLKLSCATS |
| 70. | FR-H2 | IHWVRQSSGKGLEWLGR |
| 71. | FR-H3 | AYSASLEGRFTISRDESENTAYLQMNSLKPEDTAVYYC |
| 72. | FR-H4 | WGQGTLVTVSS |
| 73. | FR-L1 | EIXXTQSPGTLSLSPGERATLSCTAS |
| 74. | FR-L2 | VAWYQQRPGLAPRLLIY |
| 75. | FR-L3 | HRATGIPDRFSGGRGGTGFTLTIRALEPEDFAVYYC |
| 76. | FR-L4 | FGQGTKVEIK |
| 77. | heavychain | XCXLVESGGDLVQPGGSLKLSCATSGFSFTGSAIHWVRQSSGK |
| | | GLEWLGRVQSYSHSFATAYSASLEGRFTISRDESENTAYLQMN |
| | | SLKPEDTAVYYCTRPFSGYDLMSDFFPNWGQGTLVTVSSKGPS |
| | | VFPLAPSSKSTSGGTAALGXLVKDYFPEPVTVSWNSGALTSGV |
| | | HTFPAVLQSSGLYSLSSVVTVPSSSLGTQTYICNVNHKPSNTKV |
| | | DKXVEPKSCDKTHTCPPCPAPELLGGPSVFLFPPKPKDTLMISR |
| | | TPEVTCVVVDVSHEDPEVKFNWYVDGVEVHNAKTKPREEQYNS |
| | | TYRVVSVLTVLHQDWLNGKEYKCKVSNKALPAPIEKTISKAKGQ |
| | | PREPQVYTLPPSRDEXTKNQVSLTCLVKGFYPSDIAVEWESNG |
| | | QPENNYKTTPPVLDSDGSFFLYSKLTVDKSRWQQGNVFSCSVM |
| | | HEALHNHYTQKSLSLSPGK |
| 78. | lightchain | GCXVTQSPISLPVTPGEPASISCRSSQSLIHSNGYNYLDWYLQK |
| | | PGQSPQLLISLGSKRASGVPERFSGSGSGTDFTLKISRVEAEDV |
| | | GIYYCMQALQTPWTFGQGTKVEIKAPSVFIFPPSDEQLKSGTAS |
| | | VVCLLNNFYPREAKVQWKVDNALQSGNSQESVTEQDSKDSTYS |
| | | LSSTLTLSKADYEKHKVYACEVTHQGLSSPVTKSFNRGEC*K |
| 79. | VH_nuc | nngtgcannctggtggagtctgggggagacttggtccagcctggggggtccctaaaactc |
| | | tcctgtgcaacctctggtttttccttcaccggctctgccatccactgggtccgccagtcttccgg |
| | | gaaaggcctggaatggcttggccgagttcaaagttattctcacagtttcgcgacagcttattct |
| | | gcgtcgctggaaggcaggttcaccatctccagagatgagtcagagaacacggcgtatctc |
| | | caaatgaatagcctgaaaccggaggacacggccgtctattattgtacaagacctttctcag |
| | | gttacgatttgatgagtgatttttttcccaactggggccagggaaccctggtcaccgtctcctc |
| | | ag |
| 80. | VL_nuc | ggatgttnngtgactcagtctccaatatccctgcccgtcacccctggagagccggcctccat |
| | | ctcttgcaggtctagtcagagcctcatacatagtaatggatacaattacttggattggtacctg |
| | | cagaagccagggcagtctccacagctcctgatctctttgggctctaagcgggcctccgggg |
| | | tccctgagaggttcagtggcagtggatcaggcacagattttacactgaaaatcagcagagt |
| | | ggaggctgaggatgttgggatttattactgcatgcaagctctacaaactccgtggacgttcg |
| | | gccaagggaccaaggtggaaatcaaac |
| SEQ ID NO | | P10 |
| 81. | CDR-H1 | GFTFEDYT |
| 82. | CDR-H2 | ISWKGGAI |
| 83. | CDR-H3 | VKDNGFRSFDS |
| 84. | CDR-L1 | QSLIHSNGYNY |
| 85. | CDR-L2 | LGS |
| 86. | CDR-L3 | MQALQTPWT |
| 87. | VH | XVXXVESGGDLVQPGRSLRLSCVISGFTFEDYTMHWVRLVPGK |
| | | GLEWVSGISWKGGAIGYADSVKGRFTISRDNGKNSLHLQMNSL |
| | | RPEDTALYHCVKDNGFRSFDSWGRGTLVAVSS |
| 88. | VL | GCXVTQSPISLPVTPGEPASISCRSSQSLIHSNGYNYLDWYLQK |
| | | PGQSPQLLISLGSKRASGVPERFSGSGSGTDFTLKISRVEAEDV |
| | | GIYYCMQALQTPWTFGQGTKVEIK |
| 89 | FR-H1 | XVXXVESGGDLVQPGRSLRLSCVIS |
| 90. | FR-H2 | MHWVRLVPGKGLEWVSG |
| 91. | FR-H3 | GYADSVKGRFTISRDNGKNSLHLQMNSLRPEDTALYHC |
| 92. | FR-H4 | WGRGTLVAVSS |
| 93. | FR-L1 | GCXVTQSPISLPVTPGEPASISCRSS |
| 94. | FR-L2 | LDWYLQKPGQSPQLLIS |
| 95. | FR-L3 | KRASGVPERFSGSGSGTDFTLKISRVEAEDVGIYYC |
| 96. | FR-L4 | FGQGTKVEIK |
| 97. | heavychain | XVXXVESGGDLVQPGRSLRLSCVISGFTFEDYTMHWVRLVPGK |
| | | GLEWVSGISWKGGAIGYADSVKGRFTISRDNGKNSLHLQMNSL |
| | | RPEDTALYHCVKDNGFRSFDSWGRGTLVAVSSKGPSVFPLAPS |
| | | SKSTSGGTAALGXLVKDYFPEPVTVSWNSGALTSGVHTFPAVL |
| | | QSSGLYSLSSVVTVPSSSLGTQTYICNVNHKPSNTKVDKXVEPK |
| | | SCDKTHTCPPCPAPELLGGPSVFLFPPKPKDTLMISRTPEVTCV |
| | | VVDVSHEDPEVKFNWYVDGVEVHNAKTKPREEQYNSTYRVVS |
| | | VLTVLHQDWLNGKEYKCKVSNKALPAPIEKTISKAKGQPREPQV |
| | | YTLPPSRDEXTKNQVSLTCLVKGFYPSDIAVEWESNGQPENNY |
| | | KTTPPVLDSDGSFFLYSKLTVDKSRWQQGNVFSCSVMHEALHN |
| | | HYTQKSLSLSPGK |
| 98. | lightchain | RCXXTQSPLSLPVTPGEPASISCRSSQSLLHSNGYNYLDWYLQK |
| | | PGQSPQLLIYFGSNRASGVPDRFSGSGSGTDFTLNITRVEAEDV |
| | | GVYYCMQALQSWTFGQGTKVEIKAPSVFIFPPSDEQLKSGTASV |
| | | VCLLNNFYPREAKVQWKVDNALQSGNSQESVTEQDSKDSTYSL |
| | | SSTLTLSKADYEKHKVYACEVTHQGLSSPVTKSFNRGEC*K |
| 99. | VH_nuc | nnngtgcnnnnggtggagtctgggggagatctggtacagcctggcaggtccctgagact |
| | | ctcttgtgtaatctctggattcacttttgaagattacaccatgcactgggtccggctagttccag |
| | | ggaagggcctggagtgggtctcaggtataagttggaaaggtggtgccataggctatgcgg |
| | | actctgtgaagggccggttcaccatctccagagacaacggcaagaactccctgcatctgc |
| | | aaatgaacagtctgagacctgaggacacggccttatatcactgtgtgaaagataatggtttt |
| | | cggtcctttgattcctggggccggggaaccctggtcgccgtctcctcag |
| 100. | VL_nuc | cgatgttnngngactcagtctccactctccctgcccgtcacccctggagagccggcctccat |
| | | ctcctgcaggtctagtcagagcctcctgcatagtaatggatacaactatttggattggtacctg |
| | | cagaagccagggcagtctccacaactcctgatctatttcggttctaatcgggcctccggggt |
| | | ccctgacaggttcagtggcagtggatcaggcacagattttacactgaacatcaccagagtg |
| | | gaggctgaggatgttggggtttattactgcatgcaagctctacaaagttggacgttcggcca |
| | | agggaccaaggtggaaatcaaac |
| SEQ ID NO | | P11 |
| 101. | CDR-H1 | GFTFRDYG |
| 102. | CDR-H2 | IRYDERNK |
| 103. | CDR-H3 | VKDSGLRYFNL |
| 104. | CDR-L1 | QSLLHSNGYNY |
| 105. | CDR-L2 | FGS |
| 106. | CDR-L3 | MQALQSWT |
| 107. | VH | XVQLVESGGGVVQPGGSLRLSCAASGFTFRDYGMHWVRQAPG |
| | | KGLEWVAFIRYDERNKYYVDSVKGRFTVSRDNSKSTLYLQMNS |
| | | LRAEDTAVYYCVKDSGLRYFNLWGRGTLVTVSS |
| 108. | VL | RCXXTQSPLSLPVTPGEPASISCRSSQSLLHSNGYNYLDWYLQK |
| | | PGQSPQLLIYFGSNRASGVPDRFSGSGSGTDFTLNITRVEAEDV |
| | | GVYYCMQALQSWTFGQGTKVEIK |
| 109. | FR-H1 | XVQLVESGGGVVQPGGSLRLSCAAS |
| 110. | FR-H2 | MHWVRQAPGKGLEWVAF |
| 111. | FR-H3 | YYVDSVKGRFTVSRDNSKSTLYLQMNSLRAEDTAVYYC |
| 112. | FR-H4 | WGRGTLVTVSS |
| 113. | FR-L1 | RCXXTQSPLSLPVTPGEPASISCRSS |
| 114. | FR-L2 | LDWYLQKPGQSPQLLIY |
| 115. | FR-L3 | NRASGVPDRFSGSGSGTDFTLNITRVEAEDVGVYYC |
| 116. | FR-L4 | FGQGTKVEIK |
| 117. | heavychain | XVQLVESGGGVVQPGGSLRLSCAASGFTFRDYGMHWVRQAPG |
| | | KGLEWVAFIRYDERNKYYVDSVKGRFTVSRDNSKSTLYLQMNS |
| | | LRAEDTAVYYCVKDSGLRYFNLWGRGTLVTVSSKGPSVFPLAP |
| | | SSKSTSGGTAALGXLVKDYFPEPVTVSWNSGALTSGVHTFPAVL |
| | | QSSGLYSLSSVVTVPSSSLGTQTYICNVNHKPSNTKVDKXVEPK |
| | | SCDKTHTCPPCPAPELLGGPSVFLFPPKPKDTLMISRTPEVTCV |
| | | VVDVSHEDPEVKFNWYVDGVEVHNAKTKPREEQYNSTYRVVS |
| | | VLTVLHQDWLNGKEYKCKVSNKALPAPIEKTISKAKGQPREPQV |
| | | YTLPPSRDEXTKNQVSLTCLVKGFYPSDIAVEWESNGQPENNY |
| | | KTTPPVLDSDGSFFLYSKLTVDKSRWQQGNVFSCSVMHEALHN |
| | | HYTQKSLSLSPGK |
| 118. | lightchain | DVXMTQSPLSLPVTPGEPASISCRSSQSLLHSNGYNYLDWYLQ |
| | | KPGQSPQLLIYFGSNRASGVPDRFSGSGSGTDFTLKISRVEAED |
| | | VGVYYCMQAQQTPWTFGQGTKVEIKAPSVFIFPPSDEQLKSGT |
| | | ASVVCLLNNFYPREAKVQWKVDNALQSGNSQESVTEQDSKDST |
| | | YSLSSTLTLSKADYEKHKVYACEVTHQGLSSPVTKSFNRGEC*K |
| 119. | VH_nuc | nnngtgcagctggtggagtctgggggaggcgtggtccagcctggggggtccctgagact |
| | | ctcctgtgcagcgtctggattcaccttcagagactatggcatgcactgggtccgccaggctc |
| | | caggcaaggggctggagtgggtggcatttatacgatatgatgagagaaataaatattatgt |
| | | agactccgtgaagggccgattcaccgtctccagagacaactccaagagcacactgtatct |
| | | ccaaatgaacagcctcagagctgaggacacggctgtatattactgtgtgaaagattccgg |
| | | gttgaggtacttcaatctctggggccgtggcaccctggtcaccgtctcctcag |
| 120. | VL_nuc | gatgttgngatgactcagtctccactctccctgcccgtcacccctggagagccggcctccat |
| | | ctcctgcaggtctagtcagagcctcctccatagtaatggatacaactatttggattggtacctg |
| | | cagaagccagggcagtctccacagctcctgatctatttcggttctaatcgggcctccggggt |
| | | ccctgacaggttcagtggcagtggatcaggcacagattttacactgaaaatcagcagagt |
| | | ggaggctgaggatgttggggtttattactgcatgcaagctcaacaaactccgtggacgttcg |
| | | gccaagggaccaaggtggaaatcaaac |
| SEQ ID NO | | P13 |
| 121. | CDR-H1 | GFTFSDYA |
| 122. | CDR-H2 | IRFDGTKI |
| 123. | CDR-H3 | AKDSGFRSFEV |
| 124. | CDR-L1 | QSLLHSNGYNY |
| 125. | CDR-L2 | FGS |
| 126. | CDR-L3 | MQAQQTPWT |
| 127. | VH | XCTLVQSGGGVVPPGGSLRLSCAASGFTFSDYAMHWVRQAPG |
| | | KGLEWVTFIRFDGTKIDYKDSVKGRFTISRDDSKNTLYLEMNTLS |
| | | TEDTAVYFCAKDSGFRSFEVWGRGTLVTVSS |
| 128. | VL | DVXMTQSPLSLPVTPGEPASISCRSSQSLLHSNGYNYLDWYLQ |
| | | KPGQSPQLLIYFGSNRASGVPDRFSGSGSGTDFTLKISRVEAED |
| | | VGVYYCMQAQQTPWTFGQGTKVEIK |
| 129. | FR-H1 | XCTLVQSGGGVVPPGGSLRLSCAAS |
| 130. | FR-H2 | MHWVRQAPGKGLEWVTF |
| 131. | FR-H3 | DYKDSVKGRFTISRDDSKNTLYLEMNTLSTEDTAVYFC |
| 132. | FR-H4 | WGRGTLVTVSS |
| 133. | FR-L1 | DVXMTQSPLSLPVTPGEPASISCRSS |
| 134. | FR-L2 | LDWYLQKPGQSPQLLIY |
| 135. | FR-L3 | NRASGVPDRFSGSGSGTDFTLKISRVEAEDVGVYYC |
| 136. | FR-L4 | FGQGTKVEIK |
| 137. | heavychain | XCTLVQSGGGVVPPGGSLRLSCAASGFTFSDYAMHWVRQAPG |
| | | KGLEWVTFIRFDGTKIDYKDSVKGRFTISRDDSKNTLYLEMNTLS |
| | | TEDTAVYFCAKDSGFRSFEVWGRGTLVTVSSKGPSVFPLAPSS |
| | | KSTSGGTAALGXLVKDYFPEPVTVSWNSGALTSGVHTFPAVLQ |
| | | SSGLYSLSSVVTVPSSSLGTQTYICNVNHKPSNTKVDKXVEPKS |
| | | CDKTHTCPPCPAPELLGGPSVFLFPPKPKDTLMISRTPEVTCVV |
| | | VDVSHEDPEVKFNWYVDGVEVHNAKTKPREEQYNSTYRVVSVL |
| | | TVLHQDWLNGKEYKCKVSNKALPAPIEKTISKAKGQPREPQVYT |
| | | LPPSRDEXTKNQVSLTCLVKGFYPSDIAVEWESNGQPENNYKTT |
| | | PPVLDSDGSFFLYSKLTVDKSRWQQGNVFSCSVMHEALHNHYT |
| | | QKSLSLSPGK |
| 138. | lightchain | DIXXTQSPLSLPVTPGEPASISCRSSQSLLHSNGYNYLDWYLQK |
| | | PGQSPQLLISLGSNRASGVPDRFSGSGSGTDFTLKISRVEAEDV |
| | | GVYYCMQALQTWTFGQGTKVEIKAPSVFIFPPSDEQLKSGTASV |
| | | VCLLNNFYPREAKVQWKVDNALQSGNSQESVTEQDSKDSTYSL |
| | | SSTLTLSKADYEKHKVYACEVTHQGLSSPVTKSFNRGEC*K |
| 139. | VH_nuc | nggtgcacgctggtgcagtctgggggaggcgtagtcccgcccggggggtccctgagact |
| | | ctcctgtgcagcgtctggattcaccttcagtgactatgccatgcactgggtccgccaggctcc |
| | | aggcaaggggctggagtgggtgacatttatacgatttgatggaactaaaatagactataaa |
| | | gactccgtgaagggccgcttcaccatctccagagacgattccaagaacaccctttatctgg |
| | | agatgaacaccctgagtactgaagacacggctgtgtatttctgtgcgaaagattcaggttttc |
| | | ggtccttcgaggtctggggccgtggcaccctggtcactgtctcctcag |
| 140. | VL_nuc | gatattgnngngactcagtctccactctccctgcccgtcacccctggagagccggcctccat |
| | | ctcctgcaggtctagccagagcctcctgcatagtaatggatacaactatttggattggtacct |
| | | gcagaagccagggcagtctccacagctcctgatctctttgggttctaatcgggcctccgggg |
| | | tccctgacaggttcagtggcagtggatcaggcacagattttacactgaaaatcagcagagt |
| | | ggaggctgaggatgttggggtttattactgcatgcaagctctacaaacttggacgttcggcc |
| | | aagggaccaaggtggaaatcaaac |
| SEQ ID NO | | P14 |
| 141. | CDR-H1 | GFTFDDYT |
| 142. | CDR-H2 | IKWNSRAI |
| 143. | CDR-H3 | VKDTGLRSFHS |
| 144. | CDR-L1 | QSLLHSNGYNY |
| 145. | CDR-L2 | LGS |
| 146. | CDR-L3 | MQALQTWT |
| 147. | VH | QVXXVESGGGLVQPGGSLRLSCAASGFTFDDYTMHWVRQPPG |
| | | KGLEWVSSIKWNSRAIDYADSVKGRFTISRDNAKNSLFLQMNTL |
| | | RTEDTAFYYCVKDTGLRSFHSWGQGTLLTVSS |
| 148. | VL | DIXXTQSPLSLPVTPGEPASISCRSSQSLLHSNGYNYLDWYLQK |
| | | PGQSPQLLISLGSNRASGVPDRFSGSGSGTDFTLKISRVEAEDV |
| | | GVYYCMQALQTWTFGQGTKVEIK |
| 149. | FR-H1 | QVXXVESGGGLVQPGGSLRLSCAAS |
| 150. | FR-H2 | MHWVRQPPGKGLEWVSS |
| 151. | FR-H3 | DYADSVKGRFTISRDNAKNSLFLQMNTLRTEDTAFYYC |
| 152. | FR-H4 | WGQGTLLTVSS |
| 153. | FR-L1 | DIXXTQSPLSLPVTPGEPASISCRSS |
| 154. | FR-L2 | LDWYLQKPGQSPQLLIS |
| 155. | FR-L3 | NRASGVPDRFSGSGSGTDFTLKISRVEAEDVGVYYC |
| 156. | FR-L4 | FGQGTKVEIK |
| 157. | heavychain | QVXXVESGGGLVQPGGSLRLSCAASGFTFDDYTMHWVRQPPG |
| | | KGLEWVSSIKWNSRAIDYADSVKGRFTISRDNAKNSLFLQMNTL |
| | | RTEDTAFYYCVKDTGLRSFHSWGQGTLLTVSSKGPSVFPLAPS |
| | | SKSTSGGTAALGXLVKDYFPEPVTVSWNSGALTSGVHTFPAVL |
| | | QSSGLYSLSSVVTVPSSSLGTQTYICNVNHKPSNTKVDKXVEPK |
| | | SCDKTHTCPPCPAPELLGGPSVFLFPPKPKDTLMISRTPEVTCV |
| | | VVDVSHEDPEVKFNWYVDGVEVHNAKTKPREEQYNSTYRVVS |
| | | VLTVLHQDWLNGKEYKCKVSNKALPAPIEKTISKAKGQPREPQV |
| | | YTLPPSRDEXTKNQVSLTCLVKGFYPSDIAVEWESNGQPENNY |
| | | KTTPPVLDSDGSFFLYSKLTVDKSRWQQGNVFSCSVMHEALHN |
| | | HYTQKSLSLSPGK |
| 158. | lightchain | RNXETQSPGTLSLSPGERATLSCTASQRVNSDSVAWYQQRPGL |
| | | APRLLIYDASHRATGIPDRFSGGRGGTGFTLTIRALEPEDFAVYY |
| | | CQQYGESPLTFGQGTKVEIKAPSVFIFPPSDEQLKSGTASVVCLL |
| | | NNFYPREAKVQWKVDNALQSGNSQESVTEQDSKDSTYSLSSTL |
| | | TLSKADYEKHKVYACEVTHQGLSSPVTKSFNRGEC*K |
| 159. | VH_nuc | caggtgncnncggtggagtcggggggaggcttggtacagcctgggggtccctgagact |
| | | ctcctgtgcagcctctggattcacctttgatgattacaccatgcattgggtccggcaacctcca |
| | | gggaagggcctggagtgggtctcaagtatcaagtggaacagtcgtgccatagactatgcg |
| | | gactctgtgaagggccgattcaccatctccagagacaacgccaagaactccctgtttctgc |
| | | aaatgaatactctgagaactgaggacacggccttctattactgtgtgaaggatacgggact |
| | | acggtcctttcactcctggggccagggaaccctgctcaccgtctcctcag |
| 160. | VL_nuc | cgaaatanngagacgcagtctccaggcaccctgtctttgtctccaggcgagagggccacc |
| | | ctctcctgcacggccagtcagagagtgaatagcgactccgtagcctggtatcagcagaga |
| | | cctggcctggcgcccaggctcctcatctatgatgcatcccacagggccactggcatcccag |
| | | acaggttcagtggcggtaggggtgggacaggcttcactctcaccatcagggcactggagc |
| | | ctgaagattttgcagtatattactgtcaacagtatggtgagtcacctctaacgttcggccaag |
| | | ggaccaaggtggaaatcaaac |
| SEQ ID NO | | P16 |
| 161. | CDR-H1 | GFSFTGSA |
| 162. | CDR-H2 | VQSYSHSFAT |
| 163. | CDR-H3 | TRPFSGYDLMSDFFPN |
| 164. | CDR-L1 | QRVNSDS |
| 165. | CDR-L2 | DAS |
| 166. | CDR-L3 | QQYGESPLT |
| 167. | VH | XVXXVESGGDLVQPGGSLKLSCATSGFSFTGSAIHWVRQSSGK |
| | | GLEWLGRVQSYSHSFATAYSASLEGRFTISRDESENTAYLQMNS |
| | | LKPEDTAVYYCTRPFSGYDLMSDFFPNWGQGTLVTVSS |
| 168. | VL | RNXETQSPGTLSLSPGERATLSCTASQRVNSDSVAWYQQRPGL |
| | | APRLLIYDASHRATGIPDRFSGGRGGTGFTLTIRALEPEDFAVYYC |
| | | QQYGESPLTFGQGTKVEIK |
| 169. | FR-H1 | XVXXVESGGDLVQPGGSLKLSCATS |
| 170. | FR-H2 | IHWVRQSSGKGLEWLGR |
| 171. | FR-H3 | AYSASLEGRFTISRDESENTAYLQMNSLKPEDTAVYYC |
| 172. | FR-H4 | WGQGTLVTVSS |
| 173. | FR-L1 | RNXETQSPGTLSLSPGERATLSCTAS |
| 174. | FR-L2 | VAWYQQRPGLAPRLLIY |
| 175. | FR-L3 | HRATGIPDRFSGGRGGTGFTLTIRALEPEDFAVYYC |
| 176. | FR-L4 | FGQGTKVEIK |
| 177. | heavychain | XVXXVESGGDLVQPGGSLKLSCATSGFSFTGSAIHWVRQSSGK |
| | | GLEWLGRVQSYSHSFATAYSASLEGRFTISRDESENTAYLQMNS |
| | | LKPEDTAVYYCTRPFSGYDLMSDFFPNWGQGTLVTVSSKGPSVF |
| | | PLAPSSKSTSGGTAALGXLVKDYFPEPVTVSWNSGALTSGVHTF |
| | | PAVLQSSGLYSLSSVVTVPSSSLGTQTYICNVNHKPSNTKVDKXV |
| | | EPKSCDKTHTCPPCPAPELLGGPSVFLFPPKPKDTLMISRTPEVT |
| | | CVVVDVSHEDPEVKFNWYVDGVEVHNAKTKPREEQYNSTYRVV |
| | | SVLTVLHQDWLNGKEYKCKVSNKALPAPIEKTISKAKGQPREPQV |
| | | YTLPPSRDEXTKNQVSLTCLVKGFYPSDIAVEWESNGQPENNYK |
| | | TTPPVLDSDGSFFLYSKLTVDKSRWQQGNVFSCSVMHEALHNH |
| | | YTQKSLSLSPGK |
| 178. | lightchain | DIXXTQSPLSLPVTPGEPASISCRSSQSLLHSNGIHYLDWYLQKP |
| | | GQSPQLLIYLGSKRASGVPDRFSGSGSGTDFTLKISRVEAEDVGV |
| | | YYCMQSLQTFTFGPGTKVDIKAPSVFIFPPSDEQLKSGTASVVCL |
| | | LNNFYPREAKVQWKVDNALQSGNSQESVTEQDSKDSTYSLSSTL |
| | | TLSKADYEKHKVYACEVTHQGLSSPVTKSFNRGEC*K |
| 179. | VH_nuc | nnngtgcnnnnngtggagtctgggggagacttggtccagcctggggggtccctaaaactct |
| | | cctgtgcaacctctggtttttccttcaccggctctgccatccactgggtccgccagtcttccggg |
| | | aaaggcctggaatggcttggccgagttcaaagttattctcacagtttcgcgacagcttattctg |
| | | cgtcgctggaaggcaggttcaccatctccagagatgagtcagagaacacggcgtatctcca |
| | | aatgaatagcctgaaaccggaggacacggccgtctattattgtacaagacctttctcaggtta |
| | | cgatttgatgagtgatttttttcccaactggggccagggaaccctggtcaccgtctcctcag |
| 180. | VL_nuc | gatattgnngngactcagtctccactctccctgcccgtcacccctggagagccggcctccat |
| | | ctcctgcaggtcaagtcagagcctcctgcacagtaatggaatccactatttggattggtatctg |
| | | cagaagccagggcagtctccacagctcctgatctatttgggttctaaacgggcctccggggt |
| | | ccctgacaggttcagtggcagtggatcaggcacagattttacacttaaaatcagcagagtgg |
| | | aggctgaggatgttggggtttattactgcatgcaatctctacaaaccttcactttcggccctggg |
| | | accaaagtggatatcaaac |
| SEQ ID NO | | P17 |
| 181. | CDR-H1 | GFTFDDYT |
| 182. | CDR-H2 | IRYDGTRA |
| 183. | CDR-H3 | VKDGGLRYFDY |
| 184. | CDR-L1 | QSLLHSNGIHY |
| 185. | CDR-L2 | LGS |
| 186 | CDR-L3 | MQSLQTFT |
| 187. | VH | XCRLVESGGDVVQPGGSLRLSCEASGFTFDDYTMHWVRQVPGK |
| | | SLEWLSLIRYDGTRAEYADSVKGRFTISRDNSKNSLFLQMNSLKT |
| | | DDSAFYYCVKDGGLRYFDYWGQGTLVTVSS |
| 188. | VL | DIXXTQSPLSLPVTPGEPASISCRSSQSLLHSNGIHYLDWYLQKP |
| | | GQSPQLLIYLGSKRASGVPDRFSGSGSGTDFTLKISRVEAEDVGV |
| | | YYCMQSLQTFTFGPGTKVDIK |
| 189. | FR-H1 | XCRLVESGGDVVQPGGSLRLSCEAS |
| 190. | FR-H2 | MHWVRQVPGKSLEWLSL |
| 191. | FR-H3 | EYADSVKGRFTISRDNSKNSLFLQMNSLKTDDSAFYYC |
| 192. | FR-H4 | WGQGTLVTVSS |
| 193. | FR-L1 | DIXXTQSPLSLPVTPGEPASISCRSS |
| 194. | FR-L2 | LDWYLQKPGQSPQLLIY |
| 195 | FR-L3 | KRASGVPDRFSGSGSGTDFTLKISRVEAEDVGVYYC |
| 196. | FR-L4 | FGPGTKVDIK |
| 197. | heavychain | XCRLVESGGDVVQPGGSLRLSCEASGFTFDDYTMHWVRQVPGK |
| | | SLEWLSLIRYDGTRAEYADSVKGRFTISRDNSKNSLFLQMNSLKT |
| | | DDSAFYYCVKDGGLRYFDYWGQGTLVTVSSKGPSVFPLAPSSK |
| | | STSGGTAALGXLVKDYFPEPVTVSWNSGALTSGVHTFPAVLQSS |
| | | GLYSLSSVVTVPSSSLGTQTYICNVNHKPSNTKVDKXVEPKSCDK |
| | | THTCPPCPAPELLGGPSVFLFPPKPKDTLMISRTPEVTCVVVDVS |
| | | HEDPEVKFNWYVDGVEVHNAKTKPREEQYNSTYRVVSVLTVLH |
| | | QDWLNGKEYKCKVSNKALPAPIEKTISKAKGQPREPQVYTLPPSR |
| | | DEXTKNQVSLTCLVKGFYPSDIAVEWESNGQPENNYKTTPPVLD |
| | | SDGSFFLYSKLTVDKSRWQQGNVFSCSVMHEALHNHYTQKSLS |
| | | LSPGK |
| 198. | lightchain | DVGXTQSPVSLPVTPGEPASISCRSSQSLXHSNGYNYLDWYLQK |
| | | PGQSPQLLIYMGSIRASGVPDRFSGSGSGTDFTLKISRVEAEDVG |
| | | VYYCMQSLQTWTFGQGTKVEIKAPSVFIFPPSDEQLKSGTASVV |
| | | CLLNNFYPREAKVQWKVDNALQSGNSQESVTEQDSKDSTYSLS |
| | | STLTLSKADYEKHKVYACEVTHQGLSSPVTKSFNRGEC*K |
| 199. | VH_nuc | nngtgcaggctggtggagtctgggggagacgtggtgcagcctggggggtccctaagactct |
| | | cctgtgaagcctctggattcacctttgatgattatactatgcactgggtccgtcaagttccgggg |
| | | aagagtctggagtggctctctcttattcgttacgacgggactagggcagaatatgcagactcc |
| | | gtgaagggtcgattcaccatctccagagacaacagcaaaaactccctttttctgcaaatgaa |
| | | cagtctgaaaactgacgactccgccttctattattgtgtaaaagatggtggattacgatactttg |
| | | actactggggccagggcactctggtcaccgtctcctcag |
| 200. | VL_nuc | gatgttggngngactcagtctccagtctccctgcccgtcacccctggagagccggcctccat |
| | | ctcctgcaggtctagtcagagcctcntacatagtaatggatacaactatttggattggtacctg |
| | | cagaagccagggcagtctccacagctcctgatctatatgggttcaattcgggcctccggggt |
| | | ccctgacaggttcagtggcagtggatcaggcacagattttacactgaaaatcagcagagtg |
| | | gaggctgaggatgttggggtttattactgcatgcaaagtctacaaacgtggacgttcggccaa |
| | | gggaccaaggtggaaatcaaac |
| SEQ ID NO | | P19 |
| 201. | CDR-H1 | GFIFGDYT |
| 202. | CDR-H2 | ISWNSGSM |
| 203. | CDR-H3 | VKDNGYRAFDF |
| 204. | CDR-L1 | QSLXHSNGYNY |
| 205. | CDR-L2 | MGS |
| 206. | CDR-L3 | MQSLQTWT |
| 207. | VH | XVXXVESGGGLVQPGRSLRLSCAASGFIFGDYTMHWVRQTPGK |
| | | GLEWVSRISWNSGSMEYADSVKGRLTISRDNAKNSLHLQMNSLR |
| | | VEDTALYYCVKDNGYRAFDFWGQGTMVTVSS |
| 208. | VL | DVGXTQSPVSLPVTPGEPASISCRSSQSLXHSNGYNYLDWYLQK |
| | | PGQSPQLLIYMGSIRASGVPDRFSGSGSGTDFTLKISRVEAEDVG |
| | | VYYCMQSLQTWTFGQGTKVEIK |
| 209. | FR-H1 | XVXXVESGGGLVQPGRSLRLSCAAS |
| 210. | FR-H2 | MHWVRQTPGKGLEWVSR |
| 211. | FR-H3 | EYADSVKGRLTISRDNAKNSLHLQMNSLRVEDTALYYC |
| 212. | FR-H4 | WGQGTMVTVSS |
| 213. | FR-L1 | DVGXTQSPVSLPVTPGEPASISCRSS |
| 214. | FR-L2 | LDWYLQKPGQSPQLLIY |
| 215. | FR-L3 | IRASGVPDRFSGSGSGTDFTLKISRVEAEDVGVYYC |
| 216. | FR-L4 | FGQGTKVEIK |
| 217. | heavychain | XVXXVESGGGLVQPGRSLRLSCAASGFIFGDYTMHWVRQTPGK |
| | | GLEWVSRISWNSGSMEYADSVKGRLTISRDNAKNSLHLQMNSLR |
| | | VEDTALYYCVKDNGYRAFDFWGQGTMVTVSSKGPSVFPLAPSS |
| | | KSTSGGTAALGXLVKDYFPEPVTVSWNSGALTSGVHTFPAVLQS |
| | | SGLYSLSSVVTVPSSSLGTQTYICNVNHKPSNTKVDKXVEPKSCD |
| | | KTHTCPPCPAPELLGGPSVFLFPPKPKDTLMISRTPEVTCVVVDV |
| | | SHEDPEVKFNWYVDGVEVHNAKTKPREEQYNSTYRVVSVLTVLH |
| | | QDWLNGKEYKCKVSNKALPAPIEKTISKAKGQPREPQVYTLPPSR |
| | | DEXTKNQVSLTCLVKGFYPSDIAVEWESNGQPENNYKTTPPVLD |
| | | SDGSFFLYSKLTVDKSRWQQGNVFSCSVMHEALHNHYTQKSLS |
| | | LSPGK |
| 218. | lightchain | RCXXTQSPLSLPVTPGEPASISCRSSQSLLHSNGYNYLDWYLQK |
| | | PGQSPQLLIYLGSNRASGVPDRFSGSGSGTDFTLKISRVEAEDVG |
| | | VYYCMQALQRWTFGQGTKVEIKAPSVFIFPPSDEQLKSGTASVV |
| | | CLLNNFYPREAKVQWKVDNALQSGNSQESVTEQDSKDSTYSLS |
| | | STLTLSKADYEKHKVYACEVTHQGLSSPVTKSFNRGEC*K |
| 219. | VH_nuc | naggtgcangnggtggagtctgggggaggcttggtacagcctggcaggtccctgagactct |
| | | cctgtgcagcctctggattcatttttggcgattataccatgcactgggtccggcaaactccagg |
| | | gaagggcctggagtgggtctctagaattagttggaatagtggaagtatggaatatgcggact |
| | | ctgtgaagggccgactcaccatctccagagacaacgccaagaactccctccatcttcaaat |
| | | gaacagtctgagagttgaggacacggccttatattactgtgtaaaagataatggttatcgtgct |
| | | tttgatttttggggccaagggacaatggtcaccgtctcttcag |
| 220. | VL_nuc | cgatgttgngngactcagtctccactctccctgcccgtcacccctggagagccggcctccatc |
| | | tcctgcaggtctagtcagagcctcctgcatagtaatggatacaactatttggattggtacctgc |
| | | agaagccagggcagtctccacagctcctgatctatttgggttctaatcgggcctccggggtcc |
| | | ctgacaggttcagtggcagtggatcaggcacagattttacactgaaaatcagcagagtgga |
| | | ggctgaggatgttggggtttattactgcatgcaagctctacaaaggtggacgttcggccaagg |
| | | gaccaaggtggaaatcaaac |
| SEQ ID NO | | P21 |
| 221. | CDR-H1 | GFDISGSA |
| 222. | CDR-H2 | IRSRSHAFAT |
| 223. | CDR-H3 | TRPFRGYDLSSDFYPN |
| 224. | CDR-L1 | QTITSGS |
| 225. | CDR-L2 | DAS |
| 226. | CDR-L3 | QQYGETPQT |
| 227. | VH | GAXLVQSGGGLVQPGGSLKVSCAVSGFDISGSAIHWVRQTSGK |
| | | GLEWLGRIRSRSHAFATAYAPSVRGRFTISTDESKNTAFLMMNS |
| | | LNSDDTAVYYCTRPFRGYDLSSDFYPNWGQGTLVTVSS |
| 228. | VL | EIGETQSPGTLSLSPGEGATLSCRASQTITSGSLAWYQQRPGLA |
| | | PRLLIYDASTRATGIPKRFSGSGSGTDFTLTISRLEPEDFAVYYC |
| | | QQYGETPQTFGQGTKVEIK |
| 229. | FR-H1 | GAXLVQSGGGLVQPGGSLKVSCAVS |
| 230. | FR-H2 | IHWVRQTSGKGLEWLGR |
| 231. | FR-H3 | AYAPSVRGRFTISTDESKNTAFLMMNSLNSDDTAVYYC |
| 232. | FR-H4 | WGQGTLVTVSS |
| 233. | FR-L1 | EIGETQSPGTLSLSPGEGATLSCRAS |
| 234. | FR-L2 | LAWYQQRPGLAPRLLIY |
| 235. | FR-L3 | TRATGIPKRFSGSGSGTDFTLTISRLEPEDFAVYYC |
| 236. | FR-L4 | FGQGTKVEIK |
| 237. | heavychain | GAXLVQSGGGLVQPGGSLKVSCAVSGFDISGSAIHWVRQTSGK |
| | | GLEWLGRIRSRSHAFATAYAPSVRGRFTISTDESKNTAFLMMNS |
| | | LNSDDTAVYYCTRPFRGYDLSSDFYPNWGQGTLVTVSSKGPSV |
| | | FPLAPSSKSTSGGTAALGXLVKDYFPEPVTVSWNSGALTSGVHT |
| | | FPAVLQSSGLYSLSSVVTVPSSSLGTQTYICNVNHKPSNTKVDK |
| | | XVEPKSCDKTHTCPPCPAPELLGGPSVFLFPPKPKDTLMISRTP |
| | | EVTCVVVDVSHEDPEVKFNWYVDGVEVHNAKTKPREEQYNSTY |
| | | RVVSVLTVLHQDWLNGKEYKCKVSNKALPAPIEKTISKAKGQPR |
| | | EPQVYTLPPSRDEXTKNQVSLTCLVKGFYPSDIAVEWESNGQP |
| | | ENNYKTTPPVLDSDGSFFLYSKLTVDKSRWQQGNVFSCSVMHE |
| | | ALHNHYTQKSLSLSPGK |
| 238. | lightchain | DVVMTQSPLSLPVTPGEPASISCRSSQSLLHSNGYNYLDWYLQ |
| | | KPGQSPQLLIYFGSKRASGVPDRFSGSGSGTDFTLRISRVEAEDI |
| | | GVYYCMQAQQTPWTFGQGTKVEIKAPSVFIFPPSDEQLKSGTA |
| | | SVVCLLNNFYPREAKVQWKVDNALQSGNSQESVTEQDSKDSTY |
| | | SLSSTLTLSKADYEKHKVYACEVTHQGLSSPVTKSFNRGEC*K |
| 239. | VH_nuc | ggtgccnnnctggtgcagtctggcggaggactggtccagcctgggggatccctgaaagtc |
| | | tcctgtgcagtctctgggttcgacatcagcggctctgccatacactgggtccgccagacctc |
| | | cgggaaagggctggagtggcttggccgaattagaagcagatctcacgcttttgcgacggc |
| | | ctatgctccgtcggtgagaggcaggttcaccatttccacagatgagtcaaagaacacggc |
| | | attcttgatgatgaacagcctgaatagcgacgacacggccgtttactactgtactcgaccatt |
| | | tcgaggttatgatttgtcgagtgacttttatcccaactggggccagggaaccctggtcaccgt |
| | | ctcctcag |
| 240. | VL_nuc | gatgttgtgatgactcagtctccactctccctgcccgtcacccctggagagccggcctccatc |
| | | tcctgcaggtctagtcagagcctcttgcatagtaatggatacaactatttggattggtacctgc |
| | | agaagccagggcagtctccacaactcctgatctatttcggttctaaacgggcctccggggtc |
| | | cctgacaggttcagtggcagtggctcaggcacagattttacactgagaatcagcagagtg |
| | | gaggctgaggatattggggtttattactgcatgcaagctcaacagactccgtggacgttcgg |
| | | ccaagggaccaaggtggaaatcaaac |
| SEQ ID NO | | P22 |
| 241. | CDR-H1 | GFTFSDYS |
| 242. | CDR-H2 | IRYDGSNK |
| 243. | CDR-H3 | VKDSGLRAFEI |
| 244. | CDR-L1 | QSLLHSNGYNY |
| 245. | CDR-L2 | LGS |
| 246. | CDR-L3 | MQALQRWT |
| 247. | VH | QVXLVESGGGVVQPGGSLRLSCAASGFTFSDYSIHWVRQAPGK |
| | | GLEWVAFIRYDGSNKDYADSVKGRITISRDNSKNTLYLQMNSLR |
| | | AEDTAVYYCVKDSGLRAFEIWGPGTMVTVSS |
| 248. | VL | RCXXTQSPLSLPVTPGEPASISCRSSQSLLHSNGYNYLDWYLQK |
| | | PGQSPQLLIYLGSNRASGVPDRFSGSGSGTDFTLKISRVEAEDV |
| | | GVYYCMQALQRWTFGQGTKVEIK |
| 249. | FR-H1 | QVXLVESGGGVVQPGGSLRLSCAAS |
| 250. | FR-H2 | IHWVRQAPGKGLEWVAF |
| 251. | FR-H3 | DYADSVKGRITISRDNSKNTLYLQMNSLRAEDTAVYYC |
| 252. | FR-H4 | WGPGTMVTVSS |
| 253. | FR-L1 | RCXXTQSPLSLPVTPGEPASISCRSS |
| 254. | FR-L2 | LDWYLQKPGQSPQLLIY |
| 255. | FR-L3 | NRASGVPDRFSGSGSGTDFTLKISRVEAEDVGVYYC |
| 256. | FR-L4 | FGQGTKVEIK |
| 257. | heavychain | QVXLVESGGGVVQPGGSLRLSCAASGFTFSDYSIHWVRQAPGK |
| | | GLEWVAFIRYDGSNKDYADSVKGRITISRDNSKNTLYLQMNSLR |
| | | AEDTAVYYCVKDSGLRAFEIWGPGTMVTVSSKGPSVFPLAPSS |
| | | KSTSGGTAALGXLVKDYFPEPVTVSWNSGALTSGVHTFPAVLQ |
| | | SSGLYSLSSVVTVPSSSLGTQTYICNVNHKPSNTKVDKXVEPKS |
| | | CDKTHTCPPCPAPELLGGPSVFLFPPKPKDTLMISRTPEVTCVV |
| | | VDVSHEDPEVKFNWYVDGVEVHNAKTKPREEQYNSTYRVVSVL |
| | | TVLHQDWLNGKEYKCKVSNKALPAPIEKTISKAKGQPREPQVYT |
| | | LPPSRDEXTKNQVSLTCLVKGFYPSDIAVEWESNGQPENNYKTT |
| | | PPVLDSDGSFFLYSKLTVDKSRWQQGNVFSCSVMHEALHNHYT |
| | | QKSLSLSPGK |
| 258. | lightchain | EIGETQSPGTLSLSPGEGATLSCRASQTITSGSLAWYQQRPGLA |
| | | PRLLIYDASTRATGIPKRFSGSGSGTDFTLTISRLEPEDFAVYYC |
| | | QQYGETPQTFGQGTKVEIKAPSVFIFPPSDEQLKSGTASVVCLL |
| | | NNFYPREAKVQWKVDNALQSGNSQESVTEQDSKDSTYSLSSTL |
| | | TLSKADYEKHKVYACEVTHQGLSSPVTKSFNRGEC*K |
| 259. | VH_nuc | caggtgcanctggtggagtctgggggaggcgtggtccagcctggggggtccctgagact |
| | | ctcctgtgcagcgtctggattcaccttcagtgactatagcattcactgggtccgccaggctcc |
| | | aggcaaggggctggaatgggtggcatttataaggtatgatggaagtaataaagactatgc |
| | | agactccgtgaagggccgaataaccatctccagagacaattccaagaacaccctgtatct |
| | | gcaaatgaacagtctgagagctgaggacacggctgtgtattactgtgtgaaagattccgga |
| | | ctacgtgcttttgagatctggggcccagggacaatggtcaccgtctcttcag |
| 260. | VL_nuc | gaaataggngagacgcagtctccaggcaccctgtctttgtctccaggggaaggcgccac |
| | | cctctcctgtagggccagtcagactattaccagcggctctttagcctggtatcagcagagac |
| | | ctggcctggcgcccaggctcctcatctatgatgcgtccaccagggccactggcatcccaaa |
| | | gaggttcagtggcagtgggtctgggacagacttcactctcacaattagcagactggagcct |
| | | gaagattttgcagtatattactgtcagcaatatggtgaaacacctcaaacgttcggccaagg |
| | | gaccaaggtggagatcaaac |
| SEQ ID NO | | P28 |
| 261. | CDR-H1 | GFTFDDYT |
| 262. | CDR-H2 | ISWKSGSL |
| 263. | CDR-H3 | VKDSGLRSFDV |
| 264. | CDR-L1 | QSLLHSNGYNY |
| 265. | CDR-L2 | FGS |
| 266. | CDR-L3 | MQAQQTPWT |
| 267. | VH | XVQLVESGGGLVQPGRSLRISCEASGFTFDDYTMHWVRQTPGK |
| | | GLEWVSGISWKSGSLGYADSVKGRFTISRDNAKNSLYLEVHSLR |
| | | PEDSAFYYCVKDSGLRSFDVWGRGTLLTVSS |
| 268. | VL | DVVMTQSPLSLPVTPGEPASISCRSSQSLLHSNGYNYLDWYLQK |
| | | PGQSPQLLIYFGSKRASGVPDRFSGSGSGTDFTLRISRVEAEDIG |
| | | VYYCMQAQQTPWTFGQGTKVEIK |
| 269. | FR-H1 | XVQLVESGGGLVQPGRSLRISCEAS |
| 270. | FR-H2 | MHWVRQTPGKGLEWVSG |
| 271. | FR-H3 | GYADSVKGRFTISRDNAKNSLYLEVHSLRPEDSAFYYC |
| 272. | FR-H4 | WGRGTLLTVSS |
| 273. | FR-L1 | DVVMTQSPLSLPVTPGEPASISCRSS |
| 274. | FR-L2 | LDWYLQKPGQSPQLLIY |
| 275. | FR-L3 | KRASGVPDRFSGSGSGTDFTLRISRVEAEDIGVYYC |
| 276. | FR-L4 | FGQGTKVEIK |
| 277. | heavychain | XVQLVESGGGLVQPGRSLRISCEASGFTFDDYTMHWVRQTPGK |
| | | GLEWVSGISWKSGSLGYADSVKGRFTISRDNAKNSLYLEVHSLR |
| | | PEDSAFYYCVKDSGLRSFDVWGRGTLLTVSSKGPSVFPLAPSSK |
| | | STSGGTAALGXLVKDYFPEPVTVSWNSGALTSGVHTFPAVLQSS |
| | | GLYSLSSVVTVPSSSLGTQTYICNVNHKPSNTKVDKXVEPKSCDK |
| | | THTCPPCPAPELLGGPSVFLFPPKPKDTLMISRTPEVTCVVVDVS |
| | | HEDPEVKFNWYVDGVEVHNAKTKPREEQYNSTYRVVSVLTVLH |
| | | QDWLNGKEYKCKVSNKALPAPIEKTISKAKGQPREPQVYTLPPSR |
| | | DEXTKNQVSLTCLVKGFYPSDIAVEWESNGQPENNYKTTPPVLD |
| | | SDGSFFLYSKLTVDKSRWQQGNVFSCSVMHEALHNHYTQKSLS |
| | | LSPGK |
| 278. | lightchain | DIXETQSPSTLSASVGDRVTITCRASQSISSWLAWYQQKPGKAPK |
| | | LLIYRASRLESGVPSRFSGSGSGTEFTLTISSLQPDDFATYYCQQ |
| | | YDTYLITFGQGTRLEIKAPSVFIFPPSDEQLKSGTASVVCLLNNFY |
| | | PREAKVQWKVDNALQSGNSQESVTEQDSKDSTYSLSSTLTLSKA |
| | | DYEKHKVYACEVTHQGLSSPVTKSFNRGEC*K |
| 279. | VH_nuc | nnngtgcagctggtggagtctgggggaggcttggtacagcctggcaggtccctgagaatct |
| | | cctgtgaagcctctggattcacctttgatgattataccatgcactgggtccggcaaactccagg |
| | | gaagggcctggagtgggtctctggcattagttggaaaagtggtagcctaggctatgcggact |
| | | ctgtgaagggccggttcaccatctccagagacaacgccaagaactccctctatttggaagtg |
| | | cacagtctgagacctgaggactcggccttctattactgtgtaaaagatagtggactacggag |
| | | cttcgatgtctggggccggggcaccctgctcactgtctcctcag |
| 280. | VL_nuc | gacatcnnngagacccagtctccttccaccctgtctgcatctgtaggggacagagtcaccat |
| | | cacttgccgggccagtcagagtattagtagctggttggcctggtatcagcagaaaccaggg |
| | | aaagcccctaaactcctgatctatcgggcgtctcgtttagaaagtggggtcccatcaaggttc |
| | | agcggcagtggatctgggacagaattcactctcaccatcagcagcctgcagcctgatgatttt |
| | | gcaacttattactgccaacaatatgatacttacctgatcaccttcggccaagggacacgactg |
| | | gagattaaac |
| SEQ ID NO | | P30 |
| 281. | CDR-H1 | GFTFSNYA |
| 282. | CDR-H2 | MSGRGGRT |
| 283. | CDR-H3 | AKDLPSDNSGLNSAEFFHV |
| 284. | CDR-L1 | QSISSW |
| 285. | CDR-L2 | RAS |
| 286. | CDR-L3 | QQYDTYLIT |
| 287. | VH | EVQLVESGGGLVQPGGSVRLSCAASGFTFSNYAMSWVRQTPGK |
| | | GLEWVSGMSGRGGRTDYADSVKGRFTISRDSSNSTLYLQMNSLR |
| | | AEDTALYYCAKDLPSDNSGLNSAEFFHVWGQGALVTVSS |
| 288. | VL | DIXETQSPSTLSASVGDRVTITCRASQSISSWLAWYQQKPGKAPK |
| | | LLIYRASRLESGVPSRFSGSGSGTEFTLTISSLQPDDFATYYCQQY |
| | | DTYLITFGQGTRLEIK |
| 289. | FR-H1 | EVQLVESGGGLVQPGGSVRLSCAAS |
| 290. | FR-H2 | MSWVRQTPGKGLEWVSG |
| 291. | FR-H3 | DYADSVKGRFTISRDSSNSTLYLQMNSLRAEDTALYYC |
| 292. | FR-H4 | WGQGALVTVSS |
| 293. | FR-L1 | DIXETQSPSTLSASVGDRVTITCRAS |
| 294. | FR-L2 | LAWYQQKPGKAPKLLIY |
| 295. | FR-L3 | RLESGVPSRFSGSGSGTEFTLTISSLQPDDFATYYC |
| 296. | FR-L4 | FGQGTRLEIK |
| 297. | heavychain | EVQLVESGGGLVQPGGSVRLSCAASGFTFSNYAMSWVRQTPGK |
| | | GLEWVSGMSGRGGRTDYADSVKGRFTISRDSSNSTLYLQMNSLR |
| | | AEDTALYYCAKDLPSDNSGLNSAEFFHVWGQGALVTVSSKGPSV |
| | | FPLAPSSKSTSGGTAALGXLVKDYFPEPVTVSWNSGALTSGVHTF |
| | | PAVLQSSGLYSLSSVVTVPSSSLGTQTYICNVNHKPSNTKVDKXVE |
| | | PKSCDKTHTCPPCPAPELLGGPSVFLFPPKPKDTLMISRTPEVTCV |
| | | VVDVSHEDPEVKFNWYVDGVEVHNAKTKPREEQYNSTYRVVSVL |
| | | TVLHQDWLNGKEYKCKVSNKALPAPIEKTISKAKGQPREPQVYTL |
| | | PPSRDEXTKNQVSLTCLVKGFYPSDIAVEWESNGQPENNYKTTPP |
| | | VLDSDGSFFLYSKLTVDKSRWQQGNVFSCSVMHEALHNHYTQKS |
| | | LSLSPGK |
| 298. | lightchain | DIRETQSPSTLSASVGDRVTITCRASESISSWLAWYQQKPGKAPKL |
| | | LIYEASTLETGVPSRFSGSGSGTEFTLTIRSLQPDDFATYYCQHYN |
| | | SDSLTFGGGTKVEIKAPSVFIFPPSDEQLKSGTASVVCLLNNFYPR |
| | | EAKVQWKVDNALQSGNSQESVTEQDSKDSTYSLSSTLTLSKADY |
| | | EKHKVYACEVTHQGLSSPVTKSFNRGEC*K |
| 299. | VH_nuc | gaggtgcagctggtggagtctgggggaggcttggtacagccgggggggtccgtgagactct |
| | | cctgtgcagcctctggattcacctttagtaattatgccatgagctgggtccgccagactccgggg |
| | | aaggggctggagtgggtctcaggtatgagtggtaggggtggtaggactgactacgcagactc |
| | | cgtgaagggccggttcaccatctccagagacagttccaacagcaccctctatctacaaatga |
| | | acagcctgagagccgaggacacggccttatattactgtgcgaaagatttaccctctgataata |
| | | gtggcctcaactccgctgaattcttccatgtctggggacagggcgccctggtcaccgtctcctca |
| | | g |
| 300. | VL_nuc | gacatccgngagacccagtctccatccaccctgtctgcatctgtaggggacagagtcaccat |
| | | cacttgccgggccagtgagagtattagtagctggttggcctggtatcagcagaaaccaggga |
| | | aagcccctaaactcctgatctatgaggcgtctactttagaaactggggtcccatcaagattcag |
| | | cggcagtggatctgggacagaattcactctcaccatcagaagcctgcagcctgatgattttgc |
| | | aacttattactgccaacactataatagtgactctctcactttcggcggcgggaccaaggtggag |
| | | atcaaac |
| SEQ ID NO | | P31 |
| 301. | CDR-H1 | GDPFTSYY |
| 302. | CDR-H2 | IFTTGST |
| 303. | CDR-H3 | ARVRRYCSGGRCYPYFYMDV |
| 304. | CDR-L1 | ESISSW |
| 305. | CDR-L2 | EAS |
| 306. | CDR-L3 | QHYNSDSLT |
| 307. | VH | QVQLQESGPGLVEPSETLSLTCTVSGDPFTSYYWTWIRQPAGKGL |
| | | EWLGRIFTTGSTSYNPSLKSRVTMSVDTSKSQFSLKLTAVTAADTA |
| | | VYYCARVRRYCSGGRCYPYFYMDVWGKGTTVIVSS |
| 308. | VL | DIRETQSPSTLSASVGDRVTITCRASESISSWLAWYQQKPGKAPKL |
| | | LIYEASTLETGVPSRFSGSGSGTEFTLTIRSLQPDDFATYYCQHYNS |
| | | DSLTFGGGTKVEIK |
| 309. | FR-H1 | QVQLQESGPGLVEPSETLSLTCTVS |
| 310. | FR-H2 | WTWIRQPAGKGLEWLGR |
| 311. | FR-H3 | SYNPSLKSRVTMSVDTSKSQFSLKLTAVTAADTAVYYC |
| 312. | FR-H4 | WGKGTTVIVSS |
| 313. | FR-L1 | DIRETQSPSTLSASVGDRVTITCRAS |
| 314. | FR-L2 | LAWYQQKPGKAPKLLIY |
| 315. | FR-L3 | TLETGVPSRFSGSGSGTEFTLTIRSLQPDDFATYYC |
| 316. | FR-L4 | FGGGTKVEIK |
| 317. | heavychain | QVQLQESGPGLVEPSETLSLTCTVSGDPFTSYYWTWIRQPAGKGL |
| | | EWLGRIFTTGSTSYNPSLKSRVTMSVDTSKSQFSLKLTAVTAADTA |
| | | VYYCARVRRYCSGGRCYPYFYMDVWGKGTTVIVSSKGPSVFPLAP |
| | | SSKSTSGGTAALGXLVKDYFPEPVTVSWNSGALTSGVHTFPAVLQ |
| | | SSGLYSLSSVVTVPSSSLGTQTYICNVNHKPSNTKVDKXVEPKSCD |
| | | KTHTCPPCPAPELLGGPSVFLFPPKPKDTLMISRTPEVTCVVVDVS |
| | | HEDPEVKFNWYVDGVEVHNAKTKPREEQYNSTYRVVSVLTVLHQD |
| | | WLNGKEYKCKVSNKALPAPIEKTISKAKGQPREPQVYTLPPSRDEX |
| | | TKNQVSLTCLVKGFYPSDIAVEWESNGQPENNYKTTPPVLDSDGS |
| | | FFLYSKLTVDKSRWQQGNVFSCSVMHEALHNHYTQKSLSLSPGK |
| 318. | lightchain | RCXXTQSPLYLPVTPGEPASISCRSSQSLLHSNGIHYLDWYLQKPG |
| | | QSPQLLIYLGSKRASGVPDRFSGSGSGTDFTLKISRVEAEDVGVYY |
| | | CMQSLQTFTFGPGTKVDIKAPSVFIFPPSDEQLKSGTASVVCLLNNF |
| | | YPREAKVQWKVDNALQSGNSQESVTEQDSKDSTYSLSSTLTLSKA |
| | | DYEKHKVYACEVTHQGLSSPVTKSFNRGEC*K |
| 319. | VH_nuc | caggtgcagctgcaggagtcgggcccaggcctggtggagccttcggagaccctgtccctcac |
| | | ctgcactgtctctggggaccccttcactagttactattggacatggatccggcagcccgccggga |
| | | agggactggagtggctagggcgtatctttaccactgggagcaccagctacaacccctccctca |
| | | agagtcgagtcaccatgtcagtggacacgtccaagagtcagttctccctgaaactgaccgctgt |
| | | gaccgccgcggacacggccgtctattactgtgcgagagtcagaagatattgtagtggtggaag |
| | | gtgctacccctacttctacatggacgtctggggcaaagggaccacggtcatcgtctcctca |
| 320. | VL_nuc | cgatgttgngngactcagtctccactctacctgcccgtcacccctggagagccggcctccatctc |
| | | ctgcaggtctagtcagagcctcctgcatagtaatggaatccactatttggattggtacctgcagaa |
| | | gccagggcagtctccacagctcctgatctatttgggttctaagcgggcctccggggtccctgaca |
| | | ggttcagtggcagtggatcaggcacagattttacactgaaaatcagcagagtggaggctgagg |
| | | atgttggagtttattactgcatgcaatctctacaaaccttcactttcggccctgggaccaaagtgga |
| | | tatcaaac |
| SEQ ID NO | | P33 |
| 321. | CDR-H1 | GFTFDDYT |
| 322. | CDR-H2 | IRWDGSRT |
| 323. | CDR-H3 | VKDGGLRYFDS |
| 324. | CDR-L1 | QSLLHSNGIHY |
| 325. | CDR-L2 | LGS |
| 326. | CDR-L3 | MQSLQTFT |
| 327. | VH | RCXLVESGGLVVQPGGSLRLSCEASGFTFDDYTMHWVRQSPQKG |
| | | LEWVSLIRWDGSRTEYADSVKGRFTISRDNSKNSLYLQMNTLRAD |
| | | DSAFYFCVKDGGLRYFDSWGQGTLVTVSS |
| 328. | VL | RCXXTQSPLYLPVTPGEPASISCRSSQSLLHSNGIHYLDWYLQKPG |
| | | QSPQLLIYLGSKRASGVPDRFSGSGSGTDFTLKISRVEAEDVGVYY |
| | | CMQSLQTFTFGPGTKVDIK |
| 329. | FR-H1 | RCXLVESGGLVVQPGGSLRLSCEAS |
| 330. | FR-H2 | MHWVRQSPQKGLEWVSL |
| 331. | FR-H3 | EYADSVKGRFTISRDNSKNSLYLQMNTLRADDSAFYFC |
| 332. | FR-H4 | WGQGTLVTVSS |
| 333. | FR-L1 | RCXXTQSPLYLPVTPGEPASISCRSS |
| 334. | FR-L2 | LDWYLQKPGQSPQLLIY |
| 335. | FR-L3 | KRASGVPDRFSGSGSGTDFTLKISRVEAEDVGVYYC |
| 336. | FR-L4 | FGPGTKVDIK |
| 337. | heavychain | RCXLVESGGLVVQPGGSLRLSCEASGFTFDDYTMHWVRQSPQKG |
| | | LEWVSLIRWDGSRTEYADSVKGRFTISRDNSKNSLYLQMNTLRAD |
| | | DSAFYFCVKDGGLRYFDSWGQGTLVTVSSKGPSVFPLAPSSKSTS |
| | | GGTAALGXLVKDYFPEPVTVSWNSGALTSGVHTFPAVLQSSGLYS |
| | | LSSVVTVPSSSLGTQTYICNVNHKPSNTKVDKXVEPKSCDKTHTCP |
| | | PCPAPELLGGPSVFLFPPKPKDTLMISRTPEVTCVVVDVSHEDPEV |
| | | KFNWYVDGVEVHNAKTKPREEQYNSTYRVVSVLTVLHQDWLNGK |
| | | EYKCKVSNKALPAPIEKTISKAKGQPREPQVYTLPPSRDEXTKNQV |
| | | SLTCLVKGFYPSDIAVEWESNGQPENNYKTTPPVLDSDGSFFLYSK |
| | | LTVDKSRWQQGNVFSCSVMHEALHNHYTQKSLSLSPGK |
| 338. | lightchain | EIVMTQSPLSLPVTPGEPASISCRSSQSLLHSNGIHYLDWYLQKPG |
| | | QSPQLLIYLGSKRASGVPDRFSGSGSGTDFTLKISRVEAEDVGVYY |
| | | CMQSLQTFTFGPGTKVDIKAPSVFIFPPSDEQLKSGTASVVCLLNNF |
| | | YPREAKVQWKVDNALQSGNSQESVTEQDSKDSTYSLSSTLTLSKA |
| | | DYEKHKVYACEVTHQGLSSPVTKSFNRGEC*K |
| 339. | VH_nuc | aggtgccnnctggtggagtctgggggactcgtggtacagcctggggggtccctgagactctcct |
| | | gtgaagcctctggattcacctttgatgattacaccatgcactgggtccgtcaatctccgcagaag |
| | | ggtctggagtgggtctctcttattcgttgggatgggagtaggacagagtatgcagactctgtgaa |
| | | gggtcgattcaccatctccagagacaacagcaagaactccctgtatctgcaaatgaacactctc |
| | | agagctgacgactccgccttctatttttgtgtaaaagatggtggcttacgctactttgactcctgggg |
| | | ccagggaactctggtcaccgtctcctcag |
| 340. | VL_nuc | gaaattgtgatgactcagtctccactctccctgcccgtcacccctggagagccggcctccatctc |
| | | ctgcaggtcaagtcagagcctcctgcacagtaatggaatccactatttggattggtacctgcaga |
| | | agccagggcagtctccacagctcctgatctatttgggttctaaacgggcctccggggtccctgac |
| | | aggttcagtggcagtggatcaggcacagattttacactgaaaatcagcagagtggaggctgag |
| | | gatgttggggtttattactgcatgcaatctctacaaaccttcactttcggccctgggaccaaagtgg |
| | | atatcaaac |
| SEQ ID NO | | P34 |
| 341. | CDR-H1 | GFTFDDYT |
| 342. | CDR-H2 | IRWDGSRT |
| 343. | CDR-H3 | VKDGGLRYFDS |
| 344. | CDR-L1 | QSLLHSNGIHY |
| 345. | CDR-L2 | LGS |
| 346. | CDR-L3 | MQSLQTFT |
| 347. | VH | QVQLVESGGLVVQPGGSLRLSCEASGFTFDDYTMHWVRQSPQKGL |
| | | EWVSLIRWDGSRTEYADSVKGRFTISRDNSKNSLYLQMNTLRADDS |
| | | AFYFCVKDGGLRYFDSWGQGTLVTVSS |
| 348. | VL | EIVMTQSPLSLPVTPGEPASISCRSSQSLLHSNGIHYLDWYLQKPGQ |
| | | SPQLLIYLGSKRASGVPDRFSGSGSGTDFTLKISRVEAEDVGVYYCM |
| | | QSLQTFTFGPGTKVDIK |
| 349. | FR-H1 | QVQLVESGGLVVQPGGSLRLSCEAS |
| 350. | FR-H2 | MHWVRQSPQKGLEWVSL |
| 351. | FR-H3 | EYADSVKGRFTISRDNSKNSLYLQMNTLRADDSAFYFC |
| 352. | FR-H4 | WGQGTLVTVSS |
| 353. | FR-L1 | EIVMTQSPLSLPVTPGEPASISCRSS |
| 354. | FR-L2 | LDWYLQKPGQSPQLLIY |
| 355. | FR-L3 | KRASGVPDRFSGSGSGTDFTLKISRVEAEDVGVYYC |
| 356. | FR-L4 | FGPGTKVDIK |
| 357. | heavychain | QVQLVESGGLVVQPGGSLRLSCEASGFTFDDYTMHWVRQSPQKGL |
| | | EWVSLIRWDGSRTEYADSVKGRFTISRDNSKNSLYLQMNTLRADDS |
| | | AFYFCVKDGGLRYFDSWGQGTLVTVSSKGPSVFPLAPSSKSTSGGT |
| | | AALGXLVKDYFPEPVTVSWNSGALTSGVHTFPAVLQSSGLYSLSSV |
| | | VTVPSSSLGTQTYICNVNHKPSNTKVDKXVEPKSCDKTHTCPPCPA |
| | | PELLGGPSVFLFPPKPKDTLMISRTPEVTCVVVDVSHEDPEVKFNWY |
| | | VDGVEVHNAKTKPREEQYNSTYRVVSVLTVLHQDWLNGKEYKCKV |
| | | SNKALPAPIEKTISKAKGQPREPQVYTLPPSRDEXTKNQVSLTCLVK |
| | | GFYPSDIAVEWESNGQPENNYKTTPPVLDSDGSFFLYSKLTVDKSR |
| | | WQQGNVFSCSVMHEALHNHYTQKSLSLSPGK |
| 358. | lightchain | RCXXTQSPLSLPVTPGEPASISCRSSQSLLHSNGYNYLDWYLQKPG |
| | | QSPQLLIYLGSNRASGVPDRFSGSGSGTDFTLKISRVEAEDVGVYYC |
| | | MQAQQSWTFGQGTKVEIKAPSVFIFPPSDEQLKSGTASVVCLLNNF |
| | | YPREAKVQWKVDNALQSGNSQESVTEQDSKDSTYSLSSTLTLSKAD |
| | | YEKHKVYACEVTHQGLSSPVTKSFNRGEC*K |
| 359. | VH_nuc | caggtgcagctggtggagtctgggggactcgtggtacagcctggggggtccctgagactctcct |
| | | gtgaagcctctggattcacctttgatgattacaccatgcactgggtccgtcaatctccgcagaagg |
| | | gtctggagtgggtctctcttattcgttgggatgggagtaggacagagtatgcagactctgtgaagg |
| | | gtcgattcaccatctccagagacaacagcaagaactccctgtatctgcaaatgaacactctcag |
| | | agctgacgactccgccttctatttttgtgtaaaagatggtggcttacgctactttgactcctggggcca |
| | | gggaactctggtcaccgtctcctcag |
| 360. | VL_nuc | cgatgttgngngactcagtctccactctccctgcccgtcacccctggagagccggcctccatctcc |
| | | tgcaggtctagtcagagcctcctgcatagtaatggatacaactatttggattggtacctgcagaag |
| | | ccagggcagtctccacaactcctgatctatttgggttctaatcgggcctccggggtccctgacagg |
| | | ttcagtggcagtggatcaggcacagattttacactgaaaatcagcagagtggaggctgaggatg |
| | | ttggggtttattactgcatgcaagctcaacaaagttggacgttcggccaagggaccaaggtggaa |
| | | atcaaac |
| SEQ ID NO | | P39 |
| 361. | CDR-H1 | GFTFEDYT |
| 362. | CDR-H2 | IHWNSEKR |
| 363. | CDR-H3 | VKDSGLRSLQY |
| 364. | CDR-L1 | QSLLHSNGYNY |
| 365. | CDR-L2 | LGS |
| 366. | CDR-L3 | MQAQQSWT |
| 367. | VH | EVXXVESGGGLVQPGGALRLSCSASGFTFEDYTMHWVRQFPGGGL |
| | | EWVSNIHWNSEKRDYADSVKGRFTISRDNAKNSLYLEMNNVRGEDT |
| | | AFYYCVKDSGLRSLQYWGQGTLVTVSS |
| 368. | VL | RCXXTQSPLSLPVTPGEPASISCRSSQSLLHSNGYNYLDWYLQKPGQ |
| | | SPQLLIYLGSNRASGVPDRFSGSGSGTDFTLKISRVEAEDVGVYYCM |
| | | QAQQSWTFGQGTKVEIK |
| 369. | FR-H1 | EVXXVESGGGLVQPGGALRLSCSAS |
| 370. | FR-H2 | MHWVRQFPGGGLEWVSN |
| 371. | FR-H3 | DYADSVKGRFTISRDNAKNSLYLEMNNVRGEDTAFYYC |
| 372. | FR-H4 | WGQGTLVTVSS |
| 373. | FR-L1 | RCXXTQSPLSLPVTPGEPASISCRSS |
| 374. | FR-L2 | LDWYLQKPGQSPQLLIY |
| 375. | FR-L3 | NRASGVPDRFSGSGSGTDFTLKISRVEAEDVGVYYC |
| 376. | FR-L4 | FGQGTKVEIK |
| 377. | heavychain | EVXXVESGGGLVQPGGALRLSCSASGFTFEDYTMHWVRQFPGGGL |
| | | EWVSNIHWNSEKRDYADSVKGRFTISRDNAKNSLYLEMNNVRGEDT |
| | | AFYYCVKDSGLRSLQYWGQGTLVTVSSKGPSVFPLAPSSKSTSGGT |
| | | AALGXLVKDYFPEPVTVSWNSGALTSGVHTFPAVLQSSGLYSLSSVV |
| | | TVPSSSLGTQTYICNVNHKPSNTKVDKXVEPKSCDKTHTCPPCPAPE |
| | | LLGGPSVFLFPPKPKDTLMISRTPEVTCVVVDVSHEDPEVKFNWYVD |
| | | GVEVHNAKTKPREEQYNSTYRVVSVLTVLHQDWLNGKEYKCKVSNK |
| | | ALPAPIEKTISKAKGQPREPQVYTLPPSRDEXTKNQVSLTCLVKGFYP |
| | | SDIAVEWESNGQPENNYKTTPPVLDSDGSFFLYSKLTVDKSRWQQG |
| | | NVFSCSVMHEALHNHYTQKSLSLSPGK |
| 378. | lightchain | XIXETQSPSSLSASVGDRVTITCRASQSISTYLNWYQQKPGKAPNLLIY |
| | | AASSLHSGVPSRFRGSGSGTDFTLTITSLQPDDFATYYCHQSYSAPR |
| | | TFGQGTTVEIKAPSVFIFPPSDEQLKSGTASVVCLLNNFYPREAKVQW |
| | | KVDNALQSGNSQESVTEQDSKDSTYSLSSTLTLSKADYEKHKVYACE |
| | | VTHQGLSSPVTKSFNRGEC*K |
| 379. | VH_nuc | gaggtgcnnnnggtggagtctgggggaggcctggtacagcctggcggggccctgagactctcct |
| | | gctcagcctctggattcacttttgaagattacacaatgcactgggtccggcaatttccagggggggg |
| | | cctggagtgggtctcaaatattcattggaatagtgaaaaaagagactatgcggactctgtgaaggg |
| | | ccggttcaccatctccagagacaacgccaagaactccctgtatttggaaatgaacaatgtgcgag |
| | | gtgaagacacggccttctattactgtgtaaaagattcggggctacggtcccttcagtactggggcca |
| | | gggaaccctggtcaccgtctcctcag |
| 380. | VL_nuc | nacatccnngagacccagtctccatcttccctgtctgcatctgtaggagacagagtcaccatcactt |
| | | gccgggcaagtcagagcattagcacctatttaaattggtatcaacaaaaaccagggaaagcccc |
| | | taacctcctgatctatgctgcatccagtttgcacagtggggtcccatcaaggttcagggggagtgga |
| | | tctgggacagatttcactctcaccatcaccagtctgcaacctgacgattttgccacttactactgtcac |
| | | cagagttacagtgcccctcgaacattcggccaagggaccacggtggaaatcaaac |
| SEQ ID NO | | S1 |
| 381. | CDR-H1 | GFSFSDSY |
| 382. | CDR-H2 | ISGSGEII |
| 383. | CDR-H3 | ARPSDYFETSEELD |
| 384. | CDR-L1 | QSISTY |
| 385. | CDR-L2 | AAS |
| 386. | CDR-L3 | HQSYSAPRT |
| 387. | VH | VXXVQSGGGLVKPGGSLRLSCTASGFSFSDSYMSWIRQAPGK |
| | | GLEWLTYISGSGEIISYADSVKGRFTISRDNAKKSVYLQMDSLR |
| | | AEDTAVYYCARPSDYFETSEELDWGQGTLVTVSS |
| 388. | VL | XIXETQSPSSLSASVGDRVTITCRASQSISTYLNWYQQKPGKAP |
| | | NLLIYAASSLHSGVPSRFRGSGSGTDFTLTITSLQPDDFATYYC |
| | | HQSYSAPRTFGQGTTVEIK |
| 389. | FR-H1 | VXXVQSGGGLVKPGGSLRLSCTAS |
| 390. | FR-H2 | MSWIRQAPGKGLEWLTY |
| 391. | FR-H3 | SYADSVKGRFTISRDNAKKSVYLQMDSLRAEDTAVYYC |
| 392. | FR-H4 | WGQGTLVTVSS |
| 393. | FR-L1 | XIXETQSPSSLSASVGDRVTITCRAS |
| 394. | FR-L2 | LNWYQQKPGKAPNLLIY |
| 395. | FR-L3 | SLHSGVPSRFRGSGSGTDFTLTITSLQPDDFATYYC |
| 396. | FR-L4 | FGQGTTVEIK |
| 397. | heavychain | VXXVQSGGGLVKPGGSLRLSCTASGFSFSDSYMSWIRQAPGK |
| | | GLEWLTYISGSGEIISYADSVKGRFTISRDNAKKSVYLQMDSLR |
| | | AEDTAVYYCARPSDYFETSEELDWGQGTLVTVSSKGPSVFPLA |
| | | PSSKSTSGGTAALGXLVKDYFPEPVTVSWNSGALTSGVHTFPA |
| | | VLQSSGLYSLSSVVTVPSSSLGTQTYICNVNHKPSNTKVDKXVE |
| | | PKSCDKTHTCPPCPAPELLGGPSVFLFPPKPKDTLMISRTPEVT |
| | | CVVVDVSHEDPEVKFNWYVDGVEVHNAKTKPREEQYNSTYRV |
| | | VSVLTVLHQDWLNGKEYKCKVSNKALPAPIEKTISKAKGQPREP |
| | | QVYTLPPSRDEXTKNQVSLTCLVKGFYPSDIAVEWESNGQPEN |
| | | NYKTTPPVLDSDGSFFLYSKLTVDKSRWQQGNVFSCSVMHEA |
| | | LHNHYTQKSLSLSPGK |
| 398. | lightchain | TQSPSSLSASVGDRVTITCQASQDISKSLNWYHQKPGKAPTVLI |
| | | YDASNLETGVPSRFSGSGSGTEFTFTISSLQSEDFGTYYCQQY |
| | | DNVPMYTFGQGTKVETKAPSVFIFPPSDEQLKSGTASVVCLLN |
| | | NFYPREAKVQWKVDNALQSGNSQESVTEQDSKDSTYSLSSTL |
| | | TLSKADYEKHKVYACEVTHQGLSSPVTKSFNRGEC*K |
| 399. | VH_nuc | aggtgcanncngtgcagtctgggggaggcttggtcaagcctggagggtccctcagactc |
| | | tcctgcacagcctctggattcagcttcagtgactcctacatgagctggatccgccaggctc |
| | | cagggaagggtctggagtggctgacatacatcagtggtagtggtgaaatcatttcctacg |
| | | cggactctgtgaagggccgattcaccatctccagggacaacgccaagaagtcagtgtat |
| | | ctgcaaatggacagcctgagagccgaggacacggccgtctattactgtgcgcggccctc |
| | | cgattattttgaaactagtgaagagctggactggggccagggaaccctggtcaccgtctc |
| | | ctcag |
| 400. | VL_nuc | gacccagtctccatcctccctgtctgcatctgtaggagacagagtcactatcacttgccag |
| | | gcgagtcaggacatcagtaaatctttaaattggtatcaccagaaaccagggaaagcccc |
| | | tacggtcctgatctacgatgcatccaatttggaaacaggggtcccatcaaggttcagtgga |
| | | agtggatctgggacagagtttactttcaccatcagcagcctgcagagtgaagattttggaa |
| | | catattactgtcaacagtatgataatgtccccatgtacacttttggtcaggggaccaaggtg |
| | | gagacgaaac |
| SEQ ID NO | | S4 |
| 401. | CDR-H1 | GMSISSYY |
| 402. | CDR-H2 | IFTTGST |
| 403. | CDR-H3 | ARLRRVVVPRVSWYFDL |
| 404. | CDR-L1 | QDISKS |
| 405. | CDR-L2 | DAS |
| 406. | CDR-L3 | QQYDNVPMYT |
| 407. | VH | RCKLQESGPGLVKPSESLSLTCNVSGMSISSYYWSWIRQPAGK |
| | | GLEWIGRIFTTGSTKDNPSLKSRVTMSVDTSRNQFSLTLTSVTAA |
| | | DTAVYYCARLRRVVVPRVSWYFDLWGHGTLVTVSS |
| 408. | VL | TQSPSSLSASVGDRVTITCQASQDISKSLNWYHQKPGKAPTVLI |
| | | YDASNLETGVPSRFSGSGSGTEFTFTISSLQSEDFGTYYCQQYD |
| | | NVPMYTFGQGTKVETK |
| 409. | FR-H1 | RCKLQESGPGLVKPSESLSLTCNVS |
| 410. | FR-H2 | WSWIRQPAGKGLEWIGR |
| 411. | FR-H3 | KDNPSLKSRVTMSVDTSRNQFSLTLTSVTAADTAVYYC |
| 412. | FR-H4 | WGHGTLVTVSS |
| 413. | FR-L1 | TQSPSSLSASVGDRVTITCQAS |
| 414. | FR-L2 | LNWYHQKPGKAPTVLIY |
| 415. | FR-L3 | NLETGVPSRFSGSGSGTEFTFTISSLQSEDFGTYYC |
| 416. | FR-L4 | FGQGTKVETK |
| 417. | heavychain | RCKLQESGPGLVKPSESLSLTCNVSGMSISSYYWSWIRQPAGK |
| | | GLEWIGRIFTTGSTKDNPSLKSRVTMSVDTSRNQFSLTLTSVTAA |
| | | DTAVYYCARLRRVVVPRVSWYFDLWGHGTLVTVSSKGPSVFPL |
| | | APSSKSTSGGTAALGXLVKDYFPEPVTVSWNSGALTSGVHTFP |
| | | AVLQSSGLYSLSSVVTVPSSSLGTQTYICNVNHKPSNTKVDKXV |
| | | EPKSCDKTHTCPPCPAPELLGGPSVFLFPPKPKDTLMISRTPEV |
| | | TCVVVDVSHEDPEVKFNWYVDGVEVHNAKTKPREEQYNSTYR |
| | | VVSVLTVLHQDWLNGKEYKCKVSNKALPAPIEKTISKAKGQPRE |
| | | PQVYTLPPSRDEXTKNQVSLTCLVKGFYPSDIAVEWESNGQPE |
| | | NNYKTTPPVLDSDGSFFLYSKLTVDKSRWQQGNVFSCSVMHEA |
| | | LHNHYTQKSLSLSPGK |
| 418. | lightchain | DIXXTQSPDSVAVSLGQRATINCESSQSVFDDSSNKNYLAWYQ |
| | | HKPGQPPKLLIYWASSRESGVPDRFIGSGSGTDFTLTISSLQAAD |
| | | VAVYYCLQYYSTPHSFGQGTKVAINAPSVFIFPPSDEQLKSGTA |
| | | SVVCLLNNFYPREAKVQWKVDNALQSGNSQESVTEQDSKDSTY |
| | | SLSSTLTLSKADYEKHKVYACEVTHQGLSSPVTKSFNRGEC*K |
| 419. | VH_nuc | aggtgcaagctgcaggagtcgggcccaggactggtgaagccttcggagagcctgtccct |
| | | cacctgcaatgtctctggtatgtccatcagtagttattactggagctggatccgacagcccgc |
| | | cgggaagggactggagtggattgggcgtatatttaccactgggagcaccaaggacaatc |
| | | cctccctcaagagtcgagtcaccatgtcagtagacacgtcgaggaaccagttctccctgac |
| | | cctgacatctgtgaccgccgcggacacggccgtatattactgtgcgagactgaggcgggtt |
| | | gttgttcctcgggtctcctggtacttcgatctctggggccatggcaccctggtcactgtctcctc |
| | | ag |
| 420. | VL_nuc | gacatcgnnnnnacccagtctccagactccgtggctgtgtctctgggccagagggccacc |
| | | atcaactgcgagtccagccagagtgttttcgatgactccagcaataagaactacttagcttg |
| | | gtatcaacacaaaccaggacagcctcctaaactactcatttactgggcatctagccggga |
| | | atccggggtccctgaccgattcattggcagcgggtctgggacagacttcactctcaccatca |
| | | gcagcctgcaggctgctgatgtggcagtttattactgtcttcaatattatagtactcctcactcttt |
| | | tggccaggggaccaaggtggcgattaacc |
| SEQ ID NO | | 24B7D4 |
| 421. | CDR-H1 | GYSFTRFD |
| 422. | CDR-H2 | MNPKSGHS |
| 423. | CDR-H3 | ARGVDNRX |
| 424. | CDR-L1 | QSVFDDSSNKNY |
| 425. | CDR-L2 | WAS |
| 426. | CDR-L3 | LQYYSTPHS |
| 427. | VH | SGAEVKKPGASVKVSCKTSGYSFTRFDINWVRQATGQGLEWM |
| | | GWMNPKSGHSGPAQKFQGRITMTVNTSISTAYMELSSLRFEDT |
| | | AVYYCARGVDNRXWGQGTLITVSS |
| 428. | VL | DIXXTQSPDSVAVSLGQRATINCESSQSVFDDSSNKNYLAWYQ |
| | | HKPGQPPKLLIYWASSRESGVPDRFIGSGSGTDFTLTISSLQAAD |
| | | VAVYYCLQYYSTPHSFGQGTKVAIN |
| 429. | FR-H1 | SGAEVKKPGASVKVSCKTS |
| 430. | FR-H2 | INWVRQATGQGLEWMGW |
| 431. | FR-H3 | GPAQKFQGRITMTVNTSISTAYMELSSLRFEDTAVYYC |
| 432. | FR-H4 | WGQGTLITVSS |
| 433. | FR-L1 | DIXXTQSPDSVAVSLGQRATINCESS |
| 434. | FR-L2 | LAWYQHKPGQPPKLLIY |
| 435. | FR-L3 | SRESGVPDRFIGSGSGTDFTLTISSLQAADVAVYYC |
| 436. | FR-L4 | FGQGTKVAIN |
| 437. | heavychain | SGAEVKKPGASVKVSCKTSGYSFTRFDINWVRQATGQGLEWM |
| | | GWMNPKSGHSGPAQKFQGRITMTVNTSISTAYMELSSLRFEDT |
| | | AVYYCARGVDNRXWGQGTLITVSSKGPSVFPLAPSSKSTSGGT |
| | | AALGXLVKDYFPEPVTVSWNSGALTSGVHTFPAVLQSSGLYSLS |
| | | SVVTVPSSSLGTQTYICNVNHKPSNTKVDKXVEPKSCDKTHTCP |
| | | PCPAPELLGGPSVFLFPPKPKDTLMISRTPEVTCVVVDVSHEDP |
| | | EVKFNWYVDGVEVHNAKTKPREEQYNSTYRVVSVLTVLHQDWL |
| | | NGKEYKCKVSNKALPAPIEKTISKAKGQPREPQVYTLPPSRDEX |
| | | TKNQVSLTCLVKGFYPSDIAVEWESNGQPENNYKTTPPVLDSD |
| | | GSFFLYSKLTVDKSRWQQGNVFSCSVMHEALHNHYTQKSLSLS |
| | | PGK |
| 438. | lightchain | DIXXTQSPDSVAVSLGQRATINCESSQSVFDDSSNKNYLAWYQ |
| | | HKPGQPPKLLIYWASSRESGVPDRFIGSGSGTDFTLTISSLQAAD |
| | | VAVYYCLQYYSTPHSFGQGTKVAINAPSVFIFPPSDEQLKSGTA |
| | | SVVCLLNNFYPREAKVQWKVDNALQSGNSQESVTEQDSKDSTY |
| | | SLSSTLTLSKADYEKHKVYACEVTHQGLSSPVTKSFNRGEC*K |
| 439. | VH_nuc | agtctggggctgaggtgaagaagcctggggcctcagtgaaggtctcctgcaagacttctg |
| | | gatacagcttcacccgttttgatatcaactgggtgcgacaggccactggacaagggcttga |
| | | gtggatgggatggatgaaccctaagagtggtcactcaggccctgcacagaagttccagg |
| | | gcagaatcaccatgaccgttaacacctccataagtacagcctacatggagctgagcagcc |
| | | tgagatttgaggacacggccgtttattattgtgcgcgaggcgtggataatcgtnnctggggc |
| | | cagggaaccctaatcaccgtctcctcag |
| 440. | VL_nuc | gacatcgnnnnnacccagtctccagactccgtggctgtgtctctgggccagagggccacc |
| | | atcaactgcgagtccagccagagtgttttcgatgactccagcaataagaactacttagcttg |
| | | gtatcaacacaaaccaggacagcctcctaaactactcatttactgggcatctagccggga |
| | | atccggggtccctgaccgattcattggcagcgggtctgggacagacttcactctcaccatca |
| | | gcagcctgcaggctgctgatgtggcagtttattactgtcttcaatattatagtactcctcactcttt |
| | | tggccaggggaccaaggtggcgattaacc |
| SEQ ID NO | | Ara h 2 |
| 441. | Ara h 2 | MAKLTILVALALFLLAAHASARQQWELQGDRRCQSQLERANLRP |
| | | CEQHLMQKIQRDEDSYGRDPYSPSQDPYSPSQDPDRRDPYSP |
| | | SPYDRRGAGSSQHQERCCNELNEFENNQRCMCEALQQIMENQ |
| | | SDRLQGRQQEQQFKRELRNLPQQCGLRAPQRCDLEVESGGRD |
| | | RY |
| SEQ ID NO | | T1 |
| 442. | CDR-H1 | GFKFQNYG |
| 443. | CDR-H2 | ISGSDEST |
| 444. | CDR-H3 | AKATAPAGKYYYYGMDV |
| 445. | CDR-L1 | QTVSSY |
| 446. | CDR-L2 | DAS |
| 447. | CDR-L3 | HQRSNWPPVHT |
| 448. | VH | XARLVESGGGVVQPGGSLRLSCVASGFKFQNYGMSWVR |
| | | QAPGKGLEWVADISGSDESTYYADSVKGRFTISRDTSKNT |
| | | LHLQMSSLRAEDTALYYCAKATAPAGKYYYYGMDVWGQG |
| | | TTVTVSS |
| 449. | VL | QSPATLSLSPGEIATLSCRASQTVSSYLAWYQLKPGQAPRL |
| | | LIYDASRRAAGIPARFSGSESGTDFTLTISSLEPEDSAVYYC |
| | | HQRSNWPPVHTFGQGTKLEIK |
| 450. | FR-H1 | XARLVESGGGVVQPGGSLRLSCVAS |
| 451. | FR-H2 | MSWVRQAPGKGLEWVAD |
| 452. | FR-H3 | YYADSVKGRFTISRDTSKNTLHLQMSSLRAEDTALYYC |
| 453. | FR-H4 | WGQGTTVTVSS |
| 454. | FR-L1 | QSPATLSLSPGEIATLSCRAS |
| 455. | FR-L2 | LAWYQLKPGQAPRLLIY |
| 456. | FR-L3 | RRAAGIPARFSGSESGTDFTLTISSLEPEDSAVYYC |
| 457. | FR-L4 | FGQGTKLEIK |
| 458. | heavychain | XARLVESGGGVVQPGGSLRLSCVASGFKFQNYGMSWVR |
| | | QAPGKGLEWVADISGSDESTYYADSVKGRFTISRDTSKNT |
| | | LHLQMSSLRAEDTALYYCAKATAPAGKYYYYGMDVWGQG |
| | | TTVTVSSKGPSVFPLAPSSKSTSGGTAALGXLVKDYFPEPV |
| | | TVSWNSGALTSGVHTFPAVLQSSGLYSLSSVVTVPSSSLG |
| | | TQTYICNVNHKPSNTKVDKXVEPKSCDKTHTCPPCPAPELL |
| | | GGPSVFLFPPKPKDTL |
| 459. | lightchain | QSPATLSLSPGEIATLSCRASQTVSSYLAWYQLKPGQAPRL |
| | | LIYDASRRAAGIPARFSGSESGTDFTLTISSLEPEDSAVYYC |
| | | HQRSNWPPVHTFGQGTKLEIKAPSVFIFPPSDEQLKSGTAS |
| | | VVCLLNNFYPREAKVQWKVDNALQSGNSQESVTEQDSKD |
| | | STYSLSSTLTLSKADYEKHKVYACEVTHQGLSSPVTKSFNR |
| | | GEC*K |
| 460. | VH_nuc | ngtgccaggctggtggagtctgggggaggcgtggttcagcctggggggtccctga |
| | | gactctcctgtgtagcctctggattcaaatttcagaactatggcatgagctgggtccgc |
| | | caggctccagggaaggggctggagtgggtcgcagatattagtggaagtgatgaa |
| | | agcacttactatgcagactccgtgaagggccggttcaccatctccagagacacttc |
| | | caagaacacactgcatctgcaaatgagcagt |
| 461. | VL_nuc | cagtctccagccaccctgtctctgtctccaggggaaatagccaccctctcctgcagg |
| | | gccagtcagactgttagcagctacttagcctggtaccaactcaaacctggccaggc |
| | | tcccaggctcctcatctatgatgcgtccaggagggccgctggcatcccagccagatt |
| | | cagtggcagtgagtctgggacagacttcactctcaccatcagcagcctagagcctg |
| | | aagattctgcagtctattactgtcaccag |
| SEQ ID NO | | T3 |
| 462. | CDR-H1 | GFTFRDYS |
| 463. | CDR-H2 | IRFDGTTK |
| 464. | CDR-H3 | AKDNGWRAFDH |
| 465. | CDR-L1 | QSLLHRNGYIY |
| 466. | CDR-L2 | FVS |
| 467. | CDR-L3 | MQALETPWT |
| 468. | VH | GGGVVQPGTSLRLSCVASGFTFRDYSMHWVRQAPGKGLE |
| | | WVSFIRFDGTTKDYRDSVKGRFIISRDDSKNTLYLQMTSLR |
| | | VEDTALYYCAKDNGWRAFDHWGQGALVTVSS |
| 469. | VL | VMTQSPLSLPVTPGEAASISCRSSQSLLHRNGYIYLDWYLQ |
| | | RPGQSPQLLISFVSKRASGAPDRFSGSGSGTDFTLTISRVE |
| | | AEDFGVYFCMQALETPWTFGPGTKLEIK |
| 470. | FR-H1 | GGGVVQPGTSLRLSCVAS |
| 471. | FR-H2 | MHWVRQAPGKGLEWVSF |
| 472. | FR-H3 | DYRDSVKGRFIISRDDSKNTLYLQMTSLRVEDTALYYC |
| 473. | FR-H4 | WGQGALVTVSS |
| 474. | FR-L1 | VMTQSPLSLPVTPGEAASISCRSS |
| 475. | FR-L2 | LDWYLQRPGQSPQLLIS |
| 476. | FR-L3 | KRASGAPDRFSGSGSGTDFTLTISRVEAEDFGVYFC |
| 477. | FR-L4 | FGPGTKLEIK |
| 478. | heavychain | GGGVVQPGTSLRLSCVASGFTFRDYSMHWVRQAPGKGLE |
| | | WVSFIRFDGTTKDYRDSVKGRFIISRDDSKNTLYLQMTSLR |
| | | VEDTALYYCAKDNGWRAFDHWGQGALVTVSSKGPSVFPL |
| | | APSSKSTSGGTAALGXLVKDYFPEPVTVSWNSGALTSGVH |
| | | TFPAVLQSSGLYSLSSVVTVPSSSLGTQTYICNVNHKPSNT |
| | | KVDKXVEPKSCDKTHTCPPCPAPELLGGPSVFLFPPKPKD |
| | | TLMISRTPEVTCVVVDVSHEDPEVKFNWYVDGVEVHNAKT |
| | | KPREEQYNSTYRVVSVLTVLHQDWLNGKEYKCKVSNKALP |
| | | APIEKTISKAKGQPREPQVYTLPPSRDEXTKNQVSLTCLVK |
| | | GFYPSDIAVEWESNGQPENNYKTTPPVLDSDGSFFLYSKL |
| | | TVDKSRWQQGNVFSCSVMHEALHNHYTQKSLSLSPGK |
| 479. | lightchain | VMTQSPLSLPVTPGEAASISCRSSQSLLHRNGYIYLDWYLQ |
| | | RPGQSPQLLISFVSKRASGAPDRFSGSGSGTDFTLTISRVE |
| | | AEDFGVYFCMQALETPWTFGPGTKLEIKAPSVFIFPPSDEQ |
| | | LKSGTASVVCLLNNFYPREAKVQWKVDNALQSGNSQESV |
| | | TEQDSKDSTYSLSSTLTLSKADYEKHKVYACEVTHQGLSS |
| | | PVTKSFNRGEC*K |
| 480. | VH_nuc | cggggggcggcgtggtccagcctgggacgtccctgagactctcctgtgtagcgtct |
| | | ggattcaccttccgtgactattccatgcactgggtccgccaggctccaggcaaggg |
| | | gctggagtgggtgtcatttatacggtttgatgggaccactaaggactatcgagactct |
| | | gtgaagggccgattcatcatctccagagacgactccaagaacacactgtatctgca |
| | | gatgacgagcctgagagttgaggacacggctttatattactgtgcgaaagacaatg |
| | | ggtggcgggcctttgaccactggggccagggagccctggtcaccgtctcctcag |
| 481. | VL_nuc | gtgatgactcagtctccactctccctgcccgtcacccctggagaggcggcctccatc |
| | | tcctgcaggtctagtcagagcctcctccatcgtaatggatacatctacttggattggta |
| | | cctgcagaggccagggcagtctccacaactcctgatctctttcgtttctaaacgggcc |
| | | tccggggcccctgacaggttcagtggctctggttcaggcacagattttacactgaca |
| | | atcagcagagtggaggctgaggattttggggtttatttctgcatgcaagcgctagaa |
| | | accccctggacgttcggcccagggaccaaactggagatcaaac |
| SEQ ID NO | | T4 |
| 482. | CDR-H1 | GDSISSYY |
| 483. | CDR-H2 | IFTSGST |
| 484. | CDR-H3 | ARDRRALSSDGNWYWYFDL |
| 485. | CDR-L1 | QTITRN |
| 486. | CDR-L2 | GAS |
| 487. | CDR-L3 | QQSDNTPRT |
| 488. | VH | ESGPRLVKPSETLSLTCIVSGDSISSYYWGWIRQPAGRGLE |
| | | WIGRIFTSGSTTYNPSLKSRVSMSVETSKNQFSLTLTSVTAA |
| | | DTAVYFCARDRRALSSDGNWYWYFDLWGRGTLVAVSS |
| 489. | VL | TQSPSSLSASVGDRVTITCRASQTITRNLNWYQQKSGEAPK |
| | | LLIYGASILQSGVPSRFTGSGSGTDFTLTISNLQPEDFASYSC |
| | | QQSDNTPRTFGQGTKVEIK |
| 490. | FR-H1 | ESGPRLVKPSETLSLTCIVS |
| 491. | FR-H2 | WGWIRQPAGRGLEWIGR |
| 492. | FR-H3 | TYNPSLKSRVSMSVETSKNQFSLTLTSVTAADTAVYFC |
| 493. | FR-H4 | WGRGTLVAVSS |
| 494. | FR-L1 | TQSPSSLSASVGDRVTITCRAS |
| 495. | FR-L2 | LNWYQQKSGEAPKLLIY |
| 496. | FR-L3 | ILQSGVPSRFTGSGSGTDFTLTISNLQPEDFASYSC |
| 497. | FR-L4 | FGQGTKVEIK |
| 498. | heavychain | ESGPRLVKPSETLSLTCIVSGDSISSYYWGWIRQPAGRGLE |
| | | WIGRIFTSGSTTYNPSLKSRVSMSVETSKNQFSLTLTSVTAA |
| | | DTAVYFCARDRRALSSDGNWYWYFDLWGRGTLVAVSSKG |
| | | PSVFPLAPSSKSTSGGTAALGXLVKDYFPEPVTVSWNSGAL |
| | | TSGVHTFPAVLQSSGLYSLSSVVTVPSSSLGTQTYICNVNHK |
| | | PSNTKVDKXVEPKSCDKTHTCPPCPAPELLGGPSVFLFPPK |
| | | PKDTLMISRTPEVTCVVVDVSHEDPEVKFNWYVDGVEVHN |
| | | AKTKPREEQYNSTYRVVSVLTVLHQDWLNGKEYKCKVSNK |
| | | ALPAPIEKTISKAKGQPREPQVYTLPPSRDEXTKNQVSLTCL |
| | | VKGFYPSDIAVEWESNGQPENNYKTTPPVLDSDGSFFLYSK |
| | | LTVDKSRWQQGNVFSCSVMHEALHNHYTQKSLSLSPGK |
| 499. | lightchain | TQSPSSLSASVGDRVTITCRASQTITRNLNWYQQKSGEAPK |
| | | LLIYGASILQSGVPSRFTGSGSGTDFTLTISNLQPEDFASYSC |
| | | QQSDNTPRTFGQGTKVEIKAPSVFIFPPSDEQLKSGTASVV |
| | | CLLNNFYPREAKVQWKVDNALQSGNSQESVTEQDSKDSTY |
| | | SLSSTLTLSKADYEKHKVYACEVTHQGLSSPVTKSFNRGEC |
| | | *K |
| 500. | VH_nuc | ggagtcgggcccacgactggtgaagccttcggagaccctgtccctcacctgcattgt |
| | | ctctggtgactccatcagtagttattattggggctggatccggcagcccgccgggagg |
| | | ggactggagtggattgggcggatctttaccagcgggagcaccacctataatccctcc |
| | | ctcaagagtcgagtctccatgtcagtagagacatccaagaaccagttctccctgaca |
| | | ctgacctctgtgaccgccgcggacacggccgtttatttctgtgcgagagatcgaagg |
| | | gcactttcgtctgacggcaactggtactggtacttcgatctctggggccgtggcaccct |
| | | ggtcgctgtctcctcgg |
| 501. | VL_nuc | gacccagtctccatcctccctgtctgcatctgtcggagacagagtcaccatcacttgcc |
| | | gggcaagtcagaccattactcggaatttaaattggtatcagcagaaatcaggggaa |
| | | gcccctaagctcctgatctatggtgcatccattttgcaaagtggggtcccatcaaggttc |
| | | actggcagtggatctgggacagatttcactctcaccatcagtaatctgcaacctgaag |
| | | attttgcaagttactcctgtcaacagagtgacaataccccgcggacgttcggccaag |
| | | ggaccaaggtggagatcaaac |
| SEQ ID NO | | T5 |
| 502. | CDR-H1 | GGSMSSYY |
| 503. | CDR-H2 | IFTTGST |
| 504. | CDR-H3 | VRDRRGRSHDSNWYWYFDL |
| 505. | CDR-L1 | QTLSRN |
| 506. | CDR-L2 | GAS |
| 507. | CDR-L3 | QQSDNTPRT |
| 508. | VH | QVQLQESGPGLVKPSETLSLTCTVSGGSMSSYYWGWIRQP |
| | | AGRGLEWIGRIFTTGSTIYNASLNSRVSMSVDTSKNQFSLKL |
| | | TSVTAADTALYFCVRDRRGRSHDSNWYWYFDLWGRGTLV |
| | | TVSS |
| 509. | VL | RVIITCRASQTLSRNLNWYQQKPGEAPKLLIYGASTLQSGVP |
| | | SRFTGSGSGTDFTLIISGLQPEDFATYYCQQSDNTPRTFGQ |
| | | GT |
| 510. | FR-H1 | QVQLQESGPGLVKPSETLSLTCTVS |
| 511. | FR-H2 | WGWIRQPAGRGLEWIGR |
| 512. | FR-H3 | IYNASLNSRVSMSVDTSKNQFSLKLTSVTAADTALYFC |
| 513. | FR-H4 | WGRGTLVTVSS |
| 514. | FR-L1 | RVIITCRAS |
| 515. | FR-L2 | LNWYQQKPGEAPKLLIY |
| 516. | FR-L3 | TLQSGVPSRFTGSGSGTDFTLIISGLQPEDFATYYC |
| 517. | FR-L4 | FGQGT |
| 518. | heavychain | QVQLQESGPGLVKPSETLSLTCTVSGGSMSSYYWGWIRQP |
| | | AGRGLEWIGRIFTTGSTIYNASLNSRVSMSVDTSKNQFSLKL |
| | | TSVTAADTALYFCVRDRRGRSHDSNWYWYFDLWGRGTLV |
| | | TVSSKGPSVFPLAPSSKSTSGGTAALGXLVKDYFPEPVTVS |
| | | WNSGALTSGVHTFPAVLQSSGLYSLSSVVTVPSSSLGTQTY |
| | | ICNVNHKPSNTKVDKXVEPKSCDKTHTCPPCPAPELLGGPS |
| | | VFLFPPKPKDTLMISRTPEVTCVVVDVSHEDPEVKFNWYVD |
| | | GVEVHNAKTKPREEQYNSTYRVVSVLTVLHQDWLNGKEYK |
| | | CKVSNKALPAPIEKTISKAKGQPREPQVYTLPPSRDEXTKNQ |
| | | VSLTCLVKGFYPSDIAVEWESNGQPENNYKTTPPVLDSDGS |
| | | FFLYSKLTVDKSRWQQGNVFSCSVMHEALHNHYTQKSLSL |
| | | SPGK |
| 519. | lightchain | RVIITCRASQTLSRNLNWYQQKPGEAPKLLIYGASTLQSGVP |
| | | SRFTGSGSGTDFTLIISGLQPEDFATYYCQQSDNTPRTFGQ |
| | | GTAPSVFIFPPSDEQLKSGTASVVCLLNNFYPREAKVQWKV |
| | | DNALQSGNSQESVTEQDSKDSTYSLSSTLTLSKADYEKHKV |
| | | YACEVTHQGLSSPVTKSFNRGEC*K |
| 520. | VH_nuc | caggtgcagctgcaggagtcgggcccaggactggtgaagccttcggagaccctgt |
| | | ccctcacctgcactgtctctggtggctccatgagtagttactactggggctggatccgg |
| | | cagcccgccgggaggggactggagtggattgggcgaatcttcaccactgggagca |
| | | ccatctacaacgcctccctcaacagtcgagtctccatgtcagtagacacgtccaaga |
| | | atcagttctccctgaaactgacctctgtgaccgccgcggacacggccttgtatttctgtg |
| | | tgagagatcgaagagggcgatcgcatgacagcaactggtactggtacttcgatctct |
| | | ggggccgtggcaccctggtcactgtctcctcgg |
| 521. | VL_nuc | cagagtcatcatcacttgccgggcaagtcagacccttagccgcaatttaaattggtat |
| | | cagcagaaaccaggggaagcccctaaactcctgatctatggtgcatccactttacaa |
| | | agtggggtcccatcaaggttcactggcagtgggtctgggacagatttcactctcatcat |
| | | tagtggtctgcaacctgaagattttgcaacttactactgtcagcagagtgacaataccc |
| | | cgcggacgttcggccaagggaccaa |
| SEQ ID NO | | 13BU2T6 |
| 600. | CDR-H1 | GYTFNRYD |
| 601. | CDR-H2 | MNPKTGNT |
| 602. | CDR-H3 | ARGVDATH |
| 603. | CDR-L1 | QSVFDSSSNKNY |
| 604. | CDR-L2 | WAS |
| 605. | CDR-L3 | QQYHSTPHT |
| 606. | VH | VKVSCKASGYTFNRYDINWVRQATGQGLEWVGWMNPKTG |
| | | NTGYAQKFQGRVTMTRDTSMSTAYMELNNLTSEDTAVYYC |
| | | ARGVDATHWGQGTRVTVSS |
| 607. | VL | TQSPDSLAVSLGERATINCKSSQSVFDSSSNKNYLGWYQQ |
| | | NPGQPPKLLIYWASNRESGVPDRFSGSGSGTDFTLTIDSLQ |
| | | AEDVAIYYCQQYHSTPHTFGQGTKLEIK |
| 608. | FR-H1 | VKVSCKAS |
| 609. | FR-H2 | INWVRQATGQGLEWVGW |
| 610. | FR-H3 | GYAQKFQGRVTMTRDTSMSTAYMELNNLTSEDTAVYYC |
| 611. | FR-H4 | WGQGTRVTVSS |
| 612. | FR-L1 | TQSPDSLAVSLGERATINCKSS |
| 613. | FR-L2 | LGWYQQNPGQPPKLLIY |
| 614. | FR-L3 | NRESGVPDRFSGSGSGTDFTLTIDSLQAEDVAIYYC |
| 615. | FR-L4 | FGQGTKLEIK |
| 616. | heavychain | VKVSCKASGYTFNRYDINWVRQATGQGLEWVGWMNPKTG |
| | | NTGYAQKFQGRVTMTRDTSMSTAYMELNNLTSEDTAVYYC |
| | | ARGVDATHWGQGTRVTVSSKGPSVFPLAPSSKSTSGGTAA |
| | | LGXLVKDYFPEPVTVSWNSGALTSGVHTFPAVLQSSGLYSL |
| | | SSVVTVPSSSLGTQTYICNVNHKPSNTKVDKXVEPKSCDKT |
| | | HTCPPCPAPELLGGPSVFLFPPKPKDTLMISRTPEVTCVVVD |
| | | VSHEDPEVKFNW |
| 617. | lightchain | TQSPDSLAVSLGERATINCKSSQSVFDSSSNKNYLGWYQQ |
| | | NPGQPPKLLIYWASNRESGVPDRFSGSGSGTDFTLTIDSLQ |
| | | AEDVAIYYCQQYHSTPHTFGQGTKLEIKAPSVFIFPPSDEQL |
| | | KSGTASVVCLLNNFYPREAKVQWKVDNALQSGNSQESVTE |
| | | QDSKDSTYSLSSTLTLSKADYEKHKVYACEVTHQGLSSPVT |
| | | KSFNRGEC*K |
| 618. | VH_nuc | agtgaaggtctcctgcaaggcttctggatacaccttcaacagatatgatatcaattggg |
| | | tgcgacaggccactggacaagggcttgagtgggtgggatggatgaacccgaaga |
| | | ccggcaacacaggctatgcacagaagttccagggcagagtcaccatgaccaggg |
| | | acacttccatgagtacagcctacatggagctgaacaacctgacatctgaggacacg |
| | | gccgtatattattgtgcgagaggggggacgc |
| 619. | VL_nuc | acccagtctccagactccctggctgtgtctctgggcgagagggccaccatcaactgc |
| | | aagtccagccagagtgtttttgacagctccagcaataagaactacttaggttggtacc |
| | | agcagaacccaggacagcctcctaagttgctcatttactgggcatctaaccgggaat |
| | | ctggggtccctgaccgattcagtggcagcgggtctgggacagatttcactctcaccat |
| | | cgacagcctgcaggctgaagatgtg |
| SEQ ID NO | | 21BU2U1 |
| 620. | CDR-H1 | GYIFSKFD |
| 621. | CDR-H2 | TNPKSGNA |
| 622. | CDR-H3 | ARGVDNRD |
| 623. | CDR-L1 | QSIFDSSSDTNY |
| 624. | CDR-L2 | WAS |
| 625. | CDR-L3 | HQYYRPPHT |
| 626. | VH | XVXLVQSGSEVKKPGASVKVSCQASGYIFSKFDINWVRQAP |
| | | GQGLEWMGWTNPKSGNAGYAPKFLGRVTMTTDTSTNTAY |
| | | MELSNLRSDDTAVYYCARGVDNRDWGQGTLVTVSS |
| 627. | VL | EXXXTQSPDSLAVSLGERATINCQSSQSIFDSSSDTNYLAW |
| | | YQQKTGQPPKLLIYWASARESGVPDRFSGGGSGTDFTLTIS |
| | | SLQAEDVAIYFCHQYYRPPHTFGQGTRLEIN |
| 628. | FR-H1 | XVXLVQSGSEVKKPGASVKVSCQAS |
| 629. | FR-H2 | INWVRQAPGQGLEWMGW |
| 630. | FR-H3 | GYAPKFLGRVTMTTDTSTNTAYMELSNLRSDDTAVYYC |
| 631. | FR-H4 | WGQGTLVTVSS |
| 632. | FR-L1 | EXXXTQSPDSLAVSLGERATINCQSS |
| 633. | FR-L2 | LAWYQQKTGQPPKLLIY |
| 634. | FR-L3 | ARESGVPDRFSGGGSGTDFTLTISSLQAEDVAIYFC |
| 635. | FR-L4 | FGQGTRLEIN |
| 636. | heavychain | XVXLVQSGSEVKKPGASVKVSCQASGYIFSKFDINWVRQAP |
| | | GQGLEWMGWTNPKSGNAGYAPKFLGRVTMTTDTSTNTAY |
| | | MELSNLRSDDTAVYYCARGVDNRDWGQGTLVTVSSKGPS |
| | | VFPLAPSSKSTSGGTAALGXLVKDYFPEPVTVSWNSGALTS |
| | | GVHTFPAVLQSSGLYSLSSVVTVPSSSLGTQTYICNVNHKP |
| | | SNTKVDKXVEPKSCDKTHTCPPCPAPELLGGPSVFLFPPKP |
| | | KDTLMISRTPEVT |
| 637. | lightchain | EXXXTQSPDSLAVSLGERATINCQSSQSIFDSSSDTNYLAW |
| | | YQQKTGQPPKLLIYWASARESGVPDRFSGGGSGTDFTLTIS |
| | | SLQAEDVAIYFCHQYYRPPHTFGQGTRLEINAPSVFIFPPSD |
| | | EQLKSGTASVVCLLNNFYPREAKVQWKVDNALQSGNSQES |
| | | VTEQDSKDSTYSLSSTLTLSKADYEKHKVYACEVTHQGLSS |
| | | PVTKSFNRGEC*K |
| 638. | VH_nuc | naggtgnnnctggtgcagtctgggagtgaggtgaagaagccyggggcctcagtga |
| | | aggtctcctgtcaggcctctggatacatcttcagtaaatttgatatcaactgggtgcgac |
| | | aggcccctggacaaggacttgagtggatgggatggacgaaccctaagagtggtaa |
| | | tgcagggtatgcaccgaaattcctgggcagagtcaccatgaccacggatacctcaa |
| | | caaacacagcctacatggagctgagcaac |
| 639. | VL_nuc | gaaatnnnnnngacgcagtctccagactccctggctgtgtctctgggcgagagggc |
| | | caccatcaactgccagtccagccagagtatttttgacagttccagcgataccaactac |
| | | ttagcttggtaccagcagaaaacaggacagcctcctaagttgctcatttactgggcat |
| | | ctgcccgggaatccggggtccctgaccgattcagtggcggcgggtctgggacagat |
| | | ttcactctcaccatcagcagcctgcag |
| SEQ ID NO | | 21BU2U2 |
| 640. | CDR-H1 | GYIFSGFD |
| 641. | CDR-H2 | MNPKSGRT |
| 642. | CDR-H3 | ARGVDNRD |
| 643. | CDR-L1 | QSVFDSSTNTNY |
| 644. | CDR-L2 | WAS |
| 645. | CDR-L3 | HQYHSTPHT |
| 646. | VH | XVXLVQSGAELKKPXASVKVSCRGSGYIFSGFDINWVRQAT |
| | | GQGLEWMGWMNPKSGRTGSAQKFQGRVTLTRNMSTNTA |
| | | YMELNSLMSEDTAVYYCARGVDNRDWGQGTLVTVSS |
| 647. | VL | DXXVTQSPDSLAVPLGERATINCKSSQSVFDSSTNTNYLAW |
| | | YQQKPGQPPKLLIYWASSRESGVPDRFSGSGSGTDFTLTIS |
| | | SLQTEDVAVYFCHQYHSTPHTFGQGTKLEIS |
| 648. | FR-H1 | XVXLVQSGAELKKPXASVKVSCRGS |
| 649. | FR-H2 | INWVRQATGQGLEWMGW |
| 650. | FR-H3 | GSAQKFQGRVTLTRNMSTNTAYMELNSLMSEDTAVYYC |
| 651. | FR-H4 | WGQGTLVTVSS |
| 652. | FR-L1 | DXXVTQSPDSLAVPLGERATINCKSS |
| 653. | FR-L2 | LAWYQQKPGQPPKLLIY |
| 654. | FR-L3 | SRESGVPDRFSGSGSGTDFTLTISSLQTEDVAVYFC |
| 655. | FR-L4 | FGQGTKLEIS |
| 656. | heavychain | XVXLVQSGAELKKPXASVKVSCRGSGYIFSGFDINWVRQAT |
| | | GQGLEWMGWMNPKSGRTGSAQKFQGRVTLTRNMSTNTA |
| | | YMELNSLMSEDTAVYYCARGVDNRDWGQGTLVTVSSKGP |
| | | SVFPLAPSSKSTSGGTAALGXLVKDYFPEPVTVSWNSGALT |
| | | SGVHTFPAVLQSSGLYSLSSVVTVPSSSLGTQTYICNVNHK |
| | | PSNTKVDKXVEPKSCDKTHTCPPCPAPELLGGPSVFLFPPK |
| | | PKDTLMISRTPEVT |
| 657. | lightchain | DXXVTQSPDSLAVPLGERATINCKSSQSVFDSSTNTNYLAW |
| | | YQQKPGQPPKLLIYWASSRESGVPDRFSGSGSGTDFTLTIS |
| | | SLQTEDVAVYFCHQYHSTPHTFGQGTKLEISAPSVFIFPPSD |
| | | EQLKSGTASVVCLLNNFYPREAKVQWKVDNALQSGNSQES |
| | | VTEQDSKDSTYSLSSTLTLSKADYEKHKVYACEVTHQGLSS |
| | | PVTKSFNRGEC*K |
| 658. | VH_nuc | gangtgcnnctggtgcagtctggggctgagttgaagaagcctsgggcctcagtgaa |
| | | ggtctcctgtaggggctctggatacatcttcagcggatttgatatcaattgggtgcgaca |
| | | ggccactggacaagggcttgagtggatggggtggatgaaccctaagagtggtagg |
| | | acaggctctgcacagaagttccagggcagagtcaccttgaccagaaatatgtccac |
| | | gaacacagcctacatggagctgaacagc |
| 659. | VL_nuc | gacatngnngtgacccagtcaccagactccctggctgtgcctctgggcgagagggc |
| | | caccatcaactgcaagtccagccagagtgtttttgacagctccaccaatacgaattac |
| | | ttagcttggtaccagcagaaaccaggacagcctcctaagctgctcatttattgggcat |
| | | cttcccgggaatccggggtccctgaccgattcagtggcagcgggtctgggacagatt |
| | | tcactctcaccatcagcagcctgcag |
| SEQ ID NO | | 21BU2U3 |
| 660. | CDR-H1 | DFTFSFYA |
| 661. | CDR-H2 | ISNNGNSQ |
| 662. | CDR-H3 | AKTLDYSEHQFYFGLDV |
| 663. | CDR-L1 | QTISSKY |
| 664. | CDR-L2 | GAS |
| 665. | CDR-L3 | QHYSNSPPYT |
| 666. | VH | QVXXVESGGGVVQPGGSLRLSCAGSDFTFSFYAIHWVRRT |
| | | PGEGLEWLTVISNNGNSQSYSDSVKGRFTVSRDNSKDTLYL |
| | | QMNNVRTDDTAVYYCAKTLDYSEHQFYFGLDVWGQGTTVI |
| | | VSS |
| 667. | VL | RNXETQSPGTLSLSPGERATLSCRTSQTISSKYLAWYQHKP |
| | | GQPPRLLLYGASRRATGVPDRFSGSGSGTDFTLTISRLEPE |
| | | DFAVYYCQHYSNSPPYTFGQGTKLDVK |
| 668. | FR-H1 | QVXXVESGGGVVQPGGSLRLSCAGS |
| 669. | FR-H2 | IHWVRRTPGEGLEWLTV |
| 670. | FR-H3 | SYSDSVKGRFTVSRDNSKDTLYLQMNNVRTDDTAVYYC |
| 671. | FR-H4 | WGQGTTVIVSS |
| 672. | FR-L1 | RNXETQSPGTLSLSPGERATLSCRTS |
| 673. | FR-L2 | LAWYQHKPGQPPRLLLY |
| 674. | FR-L3 | RRATGVPDRFSGSGSGTDFTLTISRLEPEDFAVYYC |
| 675. | FR-L4 | FGQGTKLDVK |
| 676. | heavychain | QVXXVESGGGVVQPGGSLRLSCAGSDFTFSFYAIHWVRRT |
| | | PGEGLEWLTVISNNGNSQSYSDSVKGRFTVSRDNSKDTLYL |
| | | QMNNVRTDDTAVYYCAKTLDYSEHQFYFGLDVWGQGTTVI |
| | | VSSKGPSVFPLAPSSKSTSGGTAALGXLVKDYFPEPVTVSW |
| | | NSGALTSGVHTFPAVLQSSGLYSLSSVVTVPSSSLGTQTYIC |
| | | NVNHKPSNTKVDKXVEPKSCDKTHTCPPCPAPELLGGPSVF |
| | | LFPPKPKDTL |
| 677. | lightchain | RNXETQSPGTLSLSPGERATLSCRTSQTISSKYLAWYQHKP |
| | | GQPPRLLLYGASRRATGVPDRFSGSGSGTDFTLTISRLEPE |
| | | DFAVYYCQHYSNSPPYTFGQGTKLDVKAPSVFIFPPSDEQL |
| | | KSGTASVVCLLNNFYPREAKVQWKVDNALQSGNSQESVTE |
| | | QDSKDSTYSLSSTLTLSKADYEKHKVYACEVTHQGLSSPVT |
| | | KSFNRGEC*K |
| 678. | VH_nuc | caggtgnccnnggtggagtctgggggaggcgtggtccagccgggggggtccctgc |
| | | gactctcctgtgcaggctctgattttacttttagtttttacgccatacactgggtccgccgg |
| | | actccaggtgaggggctggagtggctcacagttatctcgaataatggtaatagtcaat |
| | | cctattcagactccgtgaagggccgattcaccgtctccagagacaattccaaggata |
| | | cgttgtatctgcaaatgaacaat |
| 679. | VL_nuc | cgaaatngngagacgcagtctccaggcaccctgtctttgtctccaggggaaagagc |
| | | caccctctcctgcaggaccagtcagactataagtagtaaatatttagcctggtaccag |
| | | cataagcctggccagcctcccaggctcctcctctatggtgcatccaggagggccact |
| | | ggcgtcccagacaggttcagtggcagtgggtctgggacagacttcactctcaccatc |
| | | agcagactggagcctgaagattttgcg |
| SEQ ID NO | | 13FU1P1A3 |
| 680. | CDR-H1 | GFTFSIFG |
| 681. | CDR-H2 | ISGTGEIT |
| 682. | CDR-H3 | AKERTKYQLAYPFDY |
| 683. | CDR-L1 | QDITTY |
| 684. | CDR-L2 | DAS |
| 685. | CDR-L3 | QQYENFPRT |
| 686. | VH | VQLVESGGGLVQPGGSLRLSCTASGFTFSIFGMSWVRQAP |
| | | GKGLEWVSSISGTGEITKYTDSVKGRFTISRDNSKTTVYLQM |
| | | KSLRAEDTAFYFCAKERTKYQLAYPFDYWGQGTLVTVSS |
| 687. | VL | TQSPSSLSASVGDRVTITCQASQDITTYLSWYQQIPGKAPKL |
| | | LISDASFLQAGVPSRFSGSGSGTDFTFTITNLQPEDVATYYC |
| | | QQYENFPRTFGGGTKVEIR |
| 688. | FR-H1 | VQLVESGGGLVQPGGSLRLSCTAS |
| 689. | FR-H2 | MSWVRQAPGKGLEWVSS |
| 690. | FR-H3 | KYTDSVKGRFTISRDNSKTTVYLQMKSLRAEDTAFYFC |
| 691. | FR-H4 | WGQGTLVTVSS |
| 692. | FR-L1 | TQSPSSLSASVGDRVTITCQAS |
| 693. | FR-L2 | LSWYQQIPGKAPKLLIS |
| 694. | FR-L3 | FLQAGVPSRFSGSGSGTDFTFTITNLQPEDVATYYC |
| 695. | FR-L4 | FGGGTKVEIR |
| 696. | heavychain | VQLVESGGGLVQPGGSLRLSCTASGFTFSIFGMSWVRQAP |
| | | GKGLEWVSSISGTGEITKYTDSVKGRFTISRDNSKTTVYLQM |
| | | KSLRAEDTAFYFCAKERTKYQLAYPFDYWGQGTLVTVSSK |
| | | GPSVFPLAPSSKSTSGGTAALGXLVKDYFPEPVTVSWNSGA |
| | | LTSGVHTFPAVLQSSGLYSLSSVVTVPSSSLGTQTYICNVNH |
| | | KPSNTKVDKXVEPKSCDKTHTCPPCPAPELLGGPSVFLFPP |
| | | KPKDTLMIS |
| 697. | lightchain | TQSPSSLSASVGDRVTITCQASQDITTYLSWYQQIPGKAPKL |
| | | LISDASFLQAGVPSRFSGSGSGTDFTFTITNLQPEDVATYYC |
| | | QQYENFPRTFGGGTKVEIRAPSVFIFPPSDEQLKSGTASVV |
| | | CLLNNFYPREAKVQWKVDNALQSGNSQESVTEQDSKDSTY |
| | | SLSSTLTLSKADYEKHKVYACEVTHQGLSSPVTKSFNRGEC |
| | | *K |
| 698. | VH_nuc | gtgcagctggtggagtctgggggaggcttggtacagcctggggggtccctgagactc |
| | | tcgtgtactgcctctggcttcacttttagcatctttggcatgagttgggtccgccaggctcc |
| | | agggaaggggctggagtgggtctcaagtatcagtggtactggtgaaattacgaaat |
| | | acacagactccgtgaagggccggttcaccatctccagagacaattccaagactacc |
| | | gtgtatctgcagatgaagagcctg |
| 699. | VL_nuc | acccagtctccatcctccctgtctgcttctgttggagacagagtcaccatcacttgccag |
| | | gcgagtcaagacattaccacttatttgagttggtatcagcagataccagggaaagcc |
| | | cctaaactcctgatctccgatgcatcctttttgcaagcaggggtcccttcaagattcagt |
| | | ggaagtgggtctgggacagattttactttcaccatcaccaacctgcagcctgaggatg |
| | | ttgcaacatactactgtcaa |
| SEQ ID NO | | 13FU1P1A4 |
| 700. | CDR-H1 | GFTFNRFA |
| 701. | CDR-H2 | ISGTGAVT |
| 702. | CDR-H3 | AKDRTPVTNYYGMDV |
| 703. | CDR-L1 | QTIDNY |
| 704. | CDR-L2 | AAS |
| 705. | CDR-L3 | QQTSSTPYT |
| 706. | VH | VQLVESGGTLGQPGGSLRLSCTASGFTFNRFAINWVRQAP |
| | | GKGLEWVAAISGTGAVTYYADSVEGRFSISRENSNNTVFLE |
| | | MNNLRGEDTAVYFCAKDRTPVTNYYGMDVWGQGTTVTVS |
| | | S |
| 707. | VL | TQSPSSLSASVGDRVIITORGSQTIDNYLNWYQQKPGKAPR |
| | | LLISAASSLQGGVPSRFSGSGYGTDFTLTISSLOPEDFATYY |
| | | CQQTSSTPYTFGQGTKVEIK |
| 708. | FR-H1 | VQLVESGGTLGQPGGSLRLSCTAS |
| 709. | FR-H2 | INWVRQAPGKGLEWVAA |
| 710. | FR-H3 | YYADSVEGRFSISRENSNNTVFLEMNNLRGEDTAVYFC |
| 711. | FR-H4 | WGQGTTVTVSS |
| 712. | FR-L1 | TQSPSSLSASVGDRVIITORGS |
| 713. | FR-L2 | LNWYQQKPGKAPRLLIS |
| 714. | FR-L3 | SLQGGVPSRFSGSGYGTDFTLTISSLQPEDFATYYC |
| 715. | FR-L4 | FGQGTKVEIK |
| 716. | heavychain | VQLVESGGTLGQPGGSLRLSCTASGFTFNRFAINWVRQAP |
| | | GKGLEWVAAISGTGAVTYYADSVEGRFSISRENSNNTVFLE |
| | | MNNLRGEDTAVYFCAKDRTPVTNYYGMDVWGQGTTVTVS |
| | | SKGPSVFPLAPSSKSTSGGTAALGXLVKDYFPEPVTVSWNS |
| | | GALTSGVHTFPAVLQSSGLYSLSSVVTVPSSSLGTQTYICNV |
| | | NHKPSNTKVDKXVEPKSCDKTHTCPPCPAPELLGGPSVFLF |
| | | PPKPKDTLMIS |
| 717. | lightchain | TQSPSSLSASVGDRVIITCRGSQTIDNYLNWYQQKPGKAPR |
| | | LLISAASSLQGGVPSRFSGSGYGTDFTLTISSLOPEDFATYY |
| | | CQQTSSTPYTFGQGTKVEIKAPSVFIFPPSDEQLKSGTASVV |
| | | CLLNNFYPREAKVQWKVDNALQSGNSQESVTEQDSKDSTY |
| | | SLSSTLTLSKADYEKHKVYACEVTHQGLSSPVTKSFNRGEC |
| | | *K |
| 718. | VH_nuc | gtgcagctggtggagtctgggggaaccctgggacagccgggggggtccctgagac |
| | | tctcctgtacagcctctggattcacctttaatagatttgccatcaactgggtccgccagg |
| | | ctccagggaaggggctggaatgggtcgccgctattagtggcactggtgctgtcacat |
| | | actacgcagactccgtggagggtcggttctccatctccagagagaattccaacaaca |
| | | cggtttttctggaaatgaacaacctg |
| 719. | VL_nuc | agacccagtctccatcgtccctgtctgcatctgtgggagacagagtcatcatcacttgc |
| | | cggggaagtcagaccattgacaattatttaaattggtatcagcagaaacctgggaaa |
| | | gcccccaggctccttatctctgcggcatccagcttgcaagggggggtcccttcaaggt |
| | | tcagtggcagtggatatgggacggatttcaccctcaccatcagcagtctgcaacctg |
| | | aagattttgcaacttactactgtc |
| SEQ ID NO | | 13FU1P1A7 |
| 720. | CDR-H1 | QTIDNY |
| 721. | CDR-H2 | GAF |
| 722. | CDR-H3 | QQTYSTPYT |
| 723. | CDR-L1 | LVESGGNLGQPGGSLRLSCAASGFPFEKFAINWVRQAPGK |
| | | GLEWVSAISGTGAVTYYADSVEGRFSISRDNSKNTVFLEMN |
| | | SLRVEDTAVYFCAKDRTPVTNYYGMDVWGQGTTVTVSS |
| 724. | CDR-L2 | QSPASLSASVGDRVTITCRGSQTIDNYLNWYQHKPGKAPKL |
| | | LIYGAFSLQGGVPSRFSGSGYGTDFTLTISSLOPEDFATYYC |
| | | QQTYSTPYTFGQGTKLETN |
| 725. | CDR-L3 | LVESGGNLGQPGGSLRLSCAAS |
| 726. | VH | INWVRQAPGKGLEWVSA |
| 727. | VL | YYADSVEGRFSISRDNSKNTVFLEMNSLRVEDTAVYFC |
| 728. | FR-H1 | WGQGTTVTVSS |
| 729. | FR-H2 | QSPASLSASVGDRVTITCRGS |
| 730. | FR-H3 | LNWYQHKPGKAPKLLIY |
| 731. | FR-H4 | SLQGGVPSRFSGSGYGTDFTLTISSLOPEDFATYYC |
| 732. | FR-L1 | FGQGTKLETN |
| 733. | FR-L2 | LVESGGNLGQPGGSLRLSCAASGFPFEKFAINWVRQAPGK |
| | | GLEWVSAISGTGAVTYYADSVEGRFSISRDNSKNTVFLEMN |
| | | SLRVEDTAVYFCAKDRTPVTNYYGMDVWGQGTTVTVSSKG |
| | | PSVFPLAPSSKSTSGGTAALGXLVKDYFPEPVTVSWNSGAL |
| | | TSGVHTFPAVLQSSGLYSLSSVVTVPSSSLGTQTYICNVNHK |
| | | PSNTKVDKXVEPKSCDKTHTCPPCPAPELLGGPSVFLFPPK |
| | | PKDTLMISRT |
| 734. | FR-L3 | QSPASLSASVGDRVTITCRGSQTIDNYLNWYQHKPGKAPKL |
| | | LIYGAFSLQGGVPSRFSGSGYGTDFTLTISSLOPEDFATYYC |
| | | QQTYSTPYTFGQGTKLETNAPSVFIFPPSDEQLKSGTASVV |
| | | CLLNNFYPREAKVQWKVDNALQSGNSQESVTEQDSKDSTY |
| | | SLSSTLTLSKADYEKHKVYACEVTHQGLSSPVTKSFNRGEC |
| | | *K |
| 735. | FR-L4 | agctggtggagtctgggggaaacttgggacagccgggggggtccctgagactgtcc |
| | | tgtgcagcctctggattcccctttgagaagtttgccatcaactgggtccgccaggctcc |
| | | agggaaggggctggagtgggtctcggctattagtggtactggtgctgtcacatactac |
| | | gcagactccgtggagggccggttctccatctccagagacaattccaagaacacggt |
| | | gtttctggagatgaacagcctgagag |
| 736. | heavychain | cccagtcgccagcgtccctgtccgcatctgtaggagacagagtcaccatcacttgcc |
| | | ggggaagtcagaccattgacaattatttaaattggtatcagcacaaacctgggaaag |
| | | cccctaaactcctgatctatggggctttcagtttgcagggtggggtcccatcaaggttc |
| | | agtggcagtggatatgggacagatttcactctcaccatcagcagtctgcaacctgaa |
| | | gactttgcaacttactactgtcagc |
| 737. | lightchain | QTIDNY |
| 738. | VH_nuc | GAF |
| 739. | VL_nuc | QQTYSTPYT |
| SEQ ID NO | | 14FU2P1A11 |
| 740. | CDR-H1 | GFNFDDYT |
| 741. | CDR-H2 | IKWNSNNI |
| 742. | CDR-H3 | VKDNGFRGFHI |
| 743. | CDR-L1 | QSLLHRNGYNY |
| 744 | CDR-L2 | LGS |
| 745. | CDR-L3 | MQALESWT |
| 746. | VH | VXXVESGGGFVQPGGSLRLSCVASGFNFDDYTMHWVRQV |
| | | AGTGLEWVSSIKWNSNNIDYADSVKGRFTISRDNAKNSLFL |
| | | QMDSLRVEDTAFYYCVKDNGFRGFHIWGQGTMVTVSS |
| 747. | VL | TQSPLSLSVTPGESASISCRSSQSLLHRNGYNYLDWYLQKP |
| | | GQSPQLLIHLGSKRASGVPDRFSGSGSGTDFTLKISRVEAE |
| | | DVGVYYCMQALESWTFGQGTKVEIK |
| 748. | FR-H1 | VXXVESGGGFVQPGGSLRLSCVAS |
| 749. | FR-H2 | MHWVRQVAGTGLEWVSS |
| 750. | FR-H3 | DYADSVKGRFTISRDNAKNSLFLQMDSLRVEDTAFYYC |
| 751. | FR-H4 | WGQGTMVTVSS |
| 752. | FR-L1 | TQSPLSLSVTPGESASISCRSS |
| 753. | FR-L2 | LDWYLQKPGQSPQLLIH |
| 754. | FR-L3 | KRASGVPDRFSGSGSGTDFTLKISRVEAEDVGVYYC |
| 755. | FR-L4 | FGQGTKVEIK |
| 756. | heavychain | VXXVESGGGFVQPGGSLRLSCVASGFNFDDYTMHWVRQV |
| | | AGTGLEWVSSIKWNSNNIDYADSVKGRFTISRDNAKNSLFL |
| | | QMDSLRVEDTAFYYCVKDNGFRGFHIWGQGTMVTVSSKGP |
| | | SVFPLAPSSKSTSGGTAALGXLVKDYFPEPVTVSWNSGALT |
| | | SGVHTFPAVLQSSGLYSLSSVVTVPSSSLGTQTYICNVNHK |
| | | PSNTKVDKXVEPKSCDKTHTCPPCPAPELLGGPSVFLFPPK |
| | | PKDTLMISRTPE |
| 757. | lightchain | TQSPLSLSVTPGESASISCRSSQSLLHRNGYNYLDWYLQKP |
| | | GQSPQLLIHLGSKRASGVPDRFSGSGSGTDFTLKISRVEAE |
| | | DVGVYYCMQALESWTFGQGTKVEIKAPSVFIFPPSDEQLKS |
| | | GTASVVCLLNNFYPREAKVQWKVDNALQSGNSQESVTEQD |
| | | SKDSTYSLSSTLTLSKADYEKHKVYACEVTHQGLSSPVTKS |
| | | FNRGEC*K |
| 758. | VH_nuc | aggtgncagnggtggagtctgggggaggcttcgtacagcctggcgggtccctgag |
| | | actctcctgtgtagcctctggattcaactttgatgattataccatgcactgggtccgaca |
| | | agttgcagggacgggcctggagtgggtctcaagtattaaatggaactctaataacat |
| | | agactatgcggactctgtgaagggccggttcaccatctccagagacaacgccaag |
| | | aattccctgtttctgcagatggatagtc |
| 759. | VL_nuc | gactcagtctccactctccctgtccgtcacccctggagagtcggcctccatctcctgca |
| | | ggtctagtcagagcctcctgcatcgtaatggatacaactatttggattggtacctgcag |
| | | aagccagggcagtctccacaactcctgatccatttgggttctaagcgggcctccggg |
| | | gtccctgacaggttcagtggcagtggatcaggcacagattttacactgaaaatcagc |
| | | agagtggaggctgaggatgttgg |
| SEQ ID NO | | 14FU2P1D6 |
| 760. | CDR-H1 | GDSISSYY |
| 761. | CDR-H2 | IFTSGST |
| 762. | CDR-H3 | AKHTRDFWSDDSRVHWYFNL |
| 763. | CDR-L1 | QSVSNNF |
| 764. | CDR-L2 | GAS |
| 765. | CDR-L3 | QQYDSSPYT |
| 766. | VH | ESGPGLVKPSETLSLTCTVSGDSISSYYWSWIRQPAGKGLE |
| | | WIGRIFTSGSTNINPSLKSRVTMSVDTSKNQFSLQLGSVTAA |
| | | DTAIYYCAKHTRDFWSDDSRVHWYFNLWGRGTLVTVSS |
| 767. | VL | QSPGTLSLSPGERATLSCRASQSVSNNFLAWYQQQPGQAP |
| | | SLLIYGASTRATGIPDRFSGSGSGTDFTLTISRLEPEDFAVYF |
| | | CQQYDSSPYTFGQGTKLEIK |
| 768. | FR-H1 | ESGPGLVKPSETLSLTCTVS |
| 769. | FR-H2 | WSWIRQPAGKGLEWIGR |
| 770. | FR-H3 | NINPSLKSRVTMSVDTSKNQFSLQLGSVTAADTAIYYC |
| 771. | FR-H4 | WGRGTLVTVSS |
| 772. | FR-L1 | QSPGTLSLSPGERATLSCRAS |
| 773. | FR-L2 | LAWYQQQPGQAPSLLIY |
| 774. | FR-L3 | TRATGIPDRFSGSGSGTDFTLTISRLEPEDFAVYFC |
| 775. | FR-L4 | FGQGTKLEIK |
| 776. | heavychain | ESGPGLVKPSETLSLTCTVSGDSISSYYWSWIRQPAGKGLE |
| | | WIGRIFTSGSTNINPSLKSRVTMSVDTSKNQFSLQLGSVTAA |
| | | DTAIYYCAKHTRDFWSDDSRVHWYFNLWGRGTLVTVSSKG |
| | | PSVFPLAPSSKSTSGGTAALGXLVKDYFPEPVTVSWNSGAL |
| | | TSGVHTFPAVLQSSGLYSLSSVVTVPSSSLGTQTYICNVNHK |
| | | PSNTKVDKXVEPKSCDKTHTCPPCPAPELLGGPSVFLFPPK |
| | | PKDTLMIS |
| 777. | lightchain | QSPGTLSLSPGERATLSCRASQSVSNNFLAWYQQQPGQAP |
| | | SLLIYGASTRATGIPDRFSGSGSGTDFTLTISRLEPEDFAVYF |
| | | CQQYDSSPYTFGQGTKLEIKAPSVFIFPPSDEQLKSGTASVV |
| | | CLLNNFYPREAKVQWKVDNALQSGNSQESVTEQDSKDSTY |
| | | SLSSTLTLSKADYEKHKVYACEVTHQGLSSPVTKSFNRGEC |
| | | *K |
| 778. | VH_nuc | ggagtcgggcccaggactggtgaagccttcggagaccctgtccctcacctgcactgt |
| | | ctctggtgactccatcagtagttattattggagctggatccggcagcccgccgggaag |
| | | ggactggagtggatcgggcgtatcttcaccagtgggagcaccaacatcaacccctc |
| | | cctcaagagtcgagtcaccatgtcagtagacacgtccaaaaatcagttctccctgca |
| | | gctgggttcggtgaccgccgcggacac |
| 779. | VL_nuc | cagtctccaggcaccctgtctttgtctccaggggaaagagccaccctctcctgcagg |
| | | gccagtcagagtgttagcaacaacttcttagcctggtaccagcagcaacctggccag |
| | | gctcccagtctcctcatctatggtgcttccactagggccactggcatcccagacaggtt |
| | | cagtggcagtgggtctgggacagacttcactctcaccatcagcagactggagcctg |
| | | aagattttgcagtgtatttctgtcag |
| SEQ ID NO | | 15FU1P1A3 |
| 780. | CDR-H1 | GYTFTTYA |
| 781. | CDR-H2 | INAGNGNP |
| 782. | CDR-H3 | ARDAAGTRGNWLDP |
| 783. | CDR-L1 | QSVLYSSNNKNY |
| 784. | CDR-L2 | WAS |
| 785. | CDR-L3 | QQYYSTPLT |
| 786. | VH | QSGAEVKKPGASVKISCKASGYTFTTYAMHWVRQAPGQRL |
| | | EWMGGINAGNGNPKYSEKFQDRVTITRDTSATTAYMELSSL |
| | | RSEDTAVYYCARDAAGTRGNWLDPWGQGTLVTVSS |
| 787. | VL | QSPDSLAVSLGERATINCKSSQSVLYSSNNKNYLAWYQQKP |
| | | GQPPKLLIYWASTRESGVPDRFSGSGSGTDFTLTISSLQAE |
| | | DVAVYYCQQYYSTPLTFGGGTKVEIK |
| 788. | FR-H1 | QSGAEVKKPGASVKISCKAS |
| 789. | FR-H2 | MHWVRQAPGQRLEWMGG |
| 790. | FR-H3 | KYSEKFQDRVTITRDTSATTAYMELSSLRSEDTAVYYC |
| 791. | FR-H4 | WGQGTLVTVSS |
| 792. | FR-L1 | QSPDSLAVSLGERATINCKSS |
| 793. | FR-L2 | LAWYQQKPGQPPKLLIY |
| 794. | FR-L3 | TRESGVPDRFSGSGSGTDFTLTISSLQAEDVAVYYC |
| 795. | FR-L4 | FGGGTKVEIK |
| 796. | heavychain | QSGAEVKKPGASVKISCKASGYTFTTYAMHWVRQAPGQRL |
| | | EWMGGINAGNGNPKYSEKFQDRVTITRDTSATTAYMELSSL |
| | | RSEDTAVYYCARDAAGTRGNWLDPWGQGTLVTVSSKGPS |
| | | VFPLAPSSKSTSGGTAALGXLVKDYFPEPVTVSWNSGALTS |
| | | GVHTFPAVLQSSGLYSLSSVVTVPSSSLGTQTYICNVNHKP |
| | | SNTKVDKXVEPKSCDKTHTCPPCPAPELLGGPSVFLFPPKP |
| | | KDTLMISRTPEV |
| 797. | lightchain | QSPDSLAVSLGERATINCKSSQSVLYSSNNKNYLAWYQQKP |
| | | GQPPKLLIYWASTRESGVPDRFSGSGSGTDFTLTISSLQAE |
| | | DVAVYYCQQYYSTPLTFGGGTKVEIKAPSVFIFPPSDEQLKS |
| | | GTASVVCLLNNFYPREAKVQWKVDNALQSGNSQESVTEQD |
| | | SKDSTYSLSSTLTLSKADYEKHKVYACEVTHQGLSSPVTKS |
| | | FNRGEC*K |
| 798. | VH_nuc | gcagtccggggctgaggtgaagaagcctggggcctcagtgaagatttcctgcaagg |
| | | cttctggatacaccttcactacttatgctatgcattgggtgcgccaggcccccggacaa |
| | | aggcttgagtggatgggagggatcaacgctggcaatggtaatccaaaatattcaga |
| | | gaagttccaggacagagtcaccattaccagggacacatccgcgaccacagcctac |
| | | atggagctgagcagcctgagatctgagga |
| 799. | VL_nuc | ccagtctccagactccctggctgtgtctctgggcgagagggccaccatcaactgcaa |
| | | gtccagccagagtgttttatacagctccaacaataagaactacttagcttggtaccag |
| | | cagaaaccaggacagcctcctaagctgctcatttactgggcatctactegggaatcc |
| | | ggggtccctgaccgattcagtggcagcgggtctgggacagatttcactctcaccatca |
| | | gcagcctgcaggctgaagatgtggc |
| SEQ ID NO | | 15FU1P2A11 |
| 800. | CDR-H1 | GVSISTVNW |
| 801. | CDR-H2 | IFHSGSI |
| 802. | CDR-H3 | ARGTLVFHYGLDV |
| 803. | CDR-L1 | QSISNY |
| 804. | CDR-L2 | AAS |
| 805. | CDR-L3 | QQSYNTPPRT |
| 806. | VH | SGPGLVKPSGTLSLTCAVSGVSISTVNWWSWVRQTPGKGL |
| | | EWIGEIFHSGSINYNPSLKSRVTISLDKSKNQFSLKVTSVTAA |
| | | DTAVYFCARGTLVFHYGLDVWGQGTTVTVSS |
| 807. | VL | QSPSSLSASVGDRVTITCRASQSISNYLNWYQQKLGRAPKL |
| | | LIYAASSLQRGVPSRFSGSGSGTDFTLTISSLOPEDFATYYC |
| | | QQSYNTPPRTFGGGTKVEIK |
| 808. | FR-H1 | SGPGLVKPSGTLSLTCAVS |
| 809. | FR-H2 | WSWVRQTPGKGLEWIGE |
| 810. | FR-H3 | NYNPSLKSRVTISLDKSKNQFSLKVTSVTAADTAVYFC |
| 811. | FR-H4 | WGQGTTVTVSS |
| 812. | FR-L1 | QSPSSLSASVGDRVTITCRAS |
| 813. | FR-L2 | LNWYQQKLGRAPKLLIY |
| 814. | FR-L3 | SLQRGVPSRFSGSGSGTDFTLTISSLQPEDFATYYC |
| 815. | FR-L4 | FGGGTKVEIK |
| 816. | heavychain | SGPGLVKPSGTLSLTCAVSGVSISTVNWWSWVRQTPGKGL |
| | | EWIGEIFHSGSINYNPSLKSRVTISLDKSKNQFSLKVTSVTAA |
| | | DTAVYFCARGTLVFHYGLDVWGQGTTVTVSSKGPSVFPLA |
| | | PSSKSTSGGTAALGXLVKDYFPEPVTVSWNSGALTSGVHTF |
| | | PAVLQSSGLYSLSSVVTVPSSSLGTQTYICNVNHKPSNTKV |
| | | DKXVEPKSCDKTHTCPPCPAPELLGGPSVFLFPPKPKDTLMI |
| | | SRTPEVTC |
| 817. | lightchain | QSPSSLSASVGDRVTITCRASQSISNYLNWYQQKLGRAPKL |
| | | LIYAASSLQRGVPSRFSGSGSGTDFTLTISSLOPEDFATYYC |
| | | QQSYNTPPRTFGGGTKVEIKAPSVFIFPPSDEQLKSGTASVV |
| | | CLLNNFYPREAKVQWKVDNALQSGNSQESVTEQDSKDSTY |
| | | SLSSTLTLSKADYEKHKVYACEVTHQGLSSPVTKSFNRGEC |
| | | *K |
| 818. | VH_nuc | gtcgggcccaggactggtgaagccttcggggaccctgtccctcacctgcgctgtctct |
| | | ggtgtctccatcagtactgtaaactggtggagttgggtccgccagaccccagggaag |
| | | gggctggagtggattggggaaatctttcatagtgggagcatcaactacaacccgtcc |
| | | ctcaagagtcgagtcaccatatcacttgacaagtccaagaaccagttctccctgaag |
| | | gtgacctctgtgaccgccgcggacac |
| 819. | VL_nuc | ccagtctccatcctccctgtctgcatctgtaggagacagagtcaccatcacttgccgg |
| | | gcaagtcagagcatcagcaactatttaaattggtatcagcagaaattagggagagc |
| | | ccctaagctcctgatctatgctgcatccagtttgcaaagaggggtcccatcaaggttca |
| | | gtggcagtggatctgggacagatttcactctcaccatcagcagtctgcaacctgaag |
| | | attttgcgacttactactgtcagca |
| SEQ ID NO | | 15FU1P2B11 |
| 820. | CDR-H1 | GGSISSNSYY |
| 821. | CDR-H2 | IYYSGST |
| 822. | CDR-H3 | ARHVCFDDDYFDY |
| 823. | CDR-L1 | QSISNY |
| 824. | CDR-L2 | AAS |
| 825. | CDR-L3 | QHSYVTPYT |
| 826. | VH | VQLQESGPGLVKPSETLSLTCTVSGGSISSNSYYWGWIRQP |
| | | PGKGLEWIGSIYYSGSTYYNPSLKSRVTISVDTSKNQFSLKL |
| | | SSVTAADTAVYYCARHVCFDDDYFDYWGQGTLVTVSS |
| 827. | VL | QSPSSLSASVGDRVTITCRTSQSISNYLNWYQQKPGKAPKL |
| | | LIYAASSLQSGVPSRFSGSGSGTDFTLTISSLHPEDFATYFC |
| | | QHSYVTPYTFGQGTKLEIK |
| 828. | FR-H1 | VQLQESGPGLVKPSETLSLTCTVS |
| 829. | FR-H2 | WGWIRQPPGKGLEWIGS |
| 830. | FR-H3 | YYNPSLKSRVTISVDTSKNQFSLKLSSVTAADTAVYYC |
| 831. | FR-H4 | WGQGTLVTVSS |
| 832. | FR-L1 | QSPSSLSASVGDRVTITCRTS |
| 833. | FR-L2 | LNWYQQKPGKAPKLLIY |
| 834. | FR-L3 | SLQSGVPSRFSGSGSGTDFTLTISSLHPEDFATYFC |
| 835. | FR-L4 | FGQGTKLEIK |
| 836. | heavychain | VQLQESGPGLVKPSETLSLTCTVSGGSISSNSYYWGWIRQP |
| | | PGKGLEWIGSIYYSGSTYYNPSLKSRVTISVDTSKNQFSLKL |
| | | SSVTAADTAVYYCARHVCFDDDYFDYWGQGTLVTVSSKGP |
| | | SVFPLAPSSKSTSGGTAALGXLVKDYFPEPVTVSWNSGALT |
| | | SGVHTFPAVLQSSGLYSLSSVVTVPSSSLGTQTYICNVNHK |
| | | PSNTKVDKXVEPKSCDKTHTCPPCPAPELLGGPSVFLFPPK |
| | | PKDTLMISR |
| 837. | lightchain | QSPSSLSASVGDRVTITCRTSQSISNYLNWYQQKPGKAPKL |
| | | LIYAASSLQSGVPSRFSGSGSGTDFTLTISSLHPEDFATYFC |
| | | QHSYVTPYTFGQGTKLEIKAPSVFIFPPSDEQLKSGTASVVC |
| | | LLNNFYPREAKVQWKVDNALQSGNSQESVTEQDSKDSTYS |
| | | LSSTLTLSKADYEKHKVYACEVTHQGLSSPVTKSFNRGEC* |
| | | K |
| 838 | VH_nuc | ggtgcagctgcaggagtcgggcccaggactggtgaagccttcggagaccctgtccc |
| | | tcacctgcactgtctctggtggctccatcagcagtaatagttactactggggctggatcc |
| | | gccagcccccagggaaggggctggagtggattgggagtatctattatagtgggagc |
| | | acctactacaacccgtccctcaagagtcgagtcaccatatccgtagacacgtccaa |
| | | gaaccagttctccctgaagctgagctc |
| 839. | VL_nuc | ccagtctccatcctccctgtctgcatctgtaggagacagagtcaccatcacttgccgg |
| | | acaagtcagagcattagcaactatttaaattggtatcagcagaaaccagggaaagc |
| | | ccctaagctcctgatctatgctgcatccagtttgcaaagtggggtcccatcaaggttca |
| | | gtggcagtggatctgggacagatttcactctcaccatcagcagtctgcaccctgaag |
| | | attttgcaacttacttctgtcaaca |
| SEQ ID NO | | 15FU1P3A1 |
| 840. | CDR-H1 | GYTFTRYD |
| 841. | CDR-H2 | MNPKSGET |
| 842. | CDR-H3 | TRGVDSGV |
| 843. | CDR-L1 | QSVLDSSNNKKF |
| 844. | CDR-L2 | WAS |
| 845. | CDR-L3 | QQYYSPPHT |
| 846. | VH | LVQSGAEVKKPGASVKVSCKASGYTFTRYDINWVRQATGQ |
| | | GLEWMGWMNPKSGETGYAQKFHGRVIMSWNTSISTAYME |
| | | LSSLRSEDTAVYYCTRGVDSGVWGQGTTVTVSS |
| 847. | VL | TQSPDSLAVSLGERATINCKSSQSVLDSSNNKKFLAWFQQK |
| | | PGQRPKLLIYWASTRESGVPDRFTGSGSGTDFTLTISSLQA |
| | | EDVAVYYCQQYYSPPHTFGQGTKLEIK |
| 848. | FR-H1 | LVQSGAEVKKPGASVKVSCKAS |
| 849. | FR-H2 | INWVRQATGQGLEWMGW |
| 850. | FR-H3 | GYAQKFHGRVIMSWNTSISTAYMELSSLRSEDTAVYYC |
| 851. | FR-H4 | WGQGTTVTVSS |
| 852. | FR-L1 | TQSPDSLAVSLGERATINCKSS |
| 853. | FR-L2 | LAWFQQKPGQRPKLLIY |
| 854. | FR-L3 | TRESGVPDRFTGSGSGTDFTLTISSLQAEDVAVYYC |
| 855. | FR-L4 | FGQGTKLEIK |
| 856. | heavychain | LVQSGAEVKKPGASVKVSCKASGYTFTRYDINWVRQATGQ |
| | | GLEWMGWMNPKSGETGYAQKFHGRVIMSWNTSISTAYME |
| | | LSSLRSEDTAVYYCTRGVDSGVWGQGTTVTVSSKGPSVFP |
| | | LAPSSKSTSGGTAALGXLVKDYFPEPVTVSWNSGALTSGVH |
| | | TFPAVLQSSGLYSLSSVVTVPSSSLGTQTYICNVNHKPSNTK |
| | | VDKXVEPKSCDKTHTCPPCPAPELLGGPSVFLFPPKPKDTL |
| | | MISRTPEVTCVV |
| 857. | lightchain | TQSPDSLAVSLGERATINCKSSQSVLDSSNNKKFLAWFQQK |
| | | PGQRPKLLIYWASTRESGVPDRFTGSGSGTDFTLTISSLQA |
| | | EDVAVYYCQQYYSPPHTFGQGTKLEIKAPSVFIFPPSDEQLK |
| | | SGTASVVCLLNNFYPREAKVQWKVDNALQSGNSQESVTEQ |
| | | DSKDSTYSLSSTLTLSKADYEKHKVYACEVTHQGLSSPVTK |
| | | SFNRGEC*K |
| 858. | VH_nuc | ctggtgcagtctggggctgaggtgaagaagcctggggcctcagtgaaggtctcctgc |
| | | aaggcttctggatacaccttcaccagatatgatatcaattgggtgcgacaggccactg |
| | | gacaagggcttgagtggatgggatggatgaaccctaaaagtggtgagacagggta |
| | | tgcacagaagttccacggcagagtcatcatgagctggaacacctccattagtacag |
| | | cctacatggagctgagcagcctgagatct |
| 859. | VL_nuc | tgacccagtctccagactccctggctgtgtctctgggcgagagggccaccatcaact |
| | | gcaagtccagccagagtgttttagacagctccaacaataagaagttcttagcctggtt |
| | | ccagcagaaaccaggacagcgtcctaagttgctcatttactgggcatctacccggga |
| | | atccggggtccctgaccgattcactggcagcgggtctgggacagatttcactctcacc |
| | | atcagcagcctgcaggctgaagatg |
| SEQ ID NO | | 13FU1P2B10 |
| 860. | CDR-H1 | GGSISSYY |
| 861. | CDR-H2 | IFTSGST |
| 862. | CDR-H3 | ARDRRGLSYGTNWNWYFDL |
| 863. | CDR-L1 | QSISSN |
| 864. | CDR-L2 | AIS |
| 865. | CDR-L3 | QQSDNTPRT |
| 866. | VH | LQESGPGLVKPSETLSLTCIVSGGSISSYYWGWIRQPAGRG |
| | | LEWIGRIFTSGSTNYNPSLKSRVSMSVDTSRNQFSLTLTSVT |
| | | AADTAIYFCARDRRGLSYGTNWNWYFDLWGRGTLVTVSS |
| 867. | VL | XQSPSSLSASVGDRVTITCRASQSISSNLNWYQQKPGKAPK |
| | | LLIYAISTLQSGVPSRFTGSGSGTEFTLTISHLQPEDFATYYC |
| | | QQSDNTPRTFGQGTKVDVK |
| 868. | FR-H1 | LQESGPGLVKPSETLSLTCIVS |
| 869. | FR-H2 | WGWIRQPAGRGLEWIGR |
| 870. | FR-H3 | NYNPSLKSRVSMSVDTSRNQFSLTLTSVTAADTAIYFC |
| 871. | FR-H4 | WGRGTLVTVSS |
| 872. | FR-L1 | XQSPSSLSASVGDRVTITCRAS |
| 873. | FR-L2 | LNWYQQKPGKAPKLLIY |
| 874. | FR-L3 | TLQSGVPSRFTGSGSGTEFTLTISHLQPEDFATYYC |
| 875. | FR-L4 | FGQGTKVDVK |
| 876. | heavychain | LQESGPGLVKPSETLSLTCIVSGGSISSYYWGWIRQPAGRG |
| | | LEWIGRIFTSGSTNYNPSLKSRVSMSVDTSRNQFSLTLTSVT |
| | | AADTAIYFCARDRRGLSYGTNWNWYFDLWGRGTLVTVSSK |
| | | GPSVFPLAPSSKSTSGGTAALGXLVKDYFPEPVTVSWNSGA |
| | | LTSGVHTFPAVLQSSGLYSLSSVVTVPSSSLGTQTYICNVNH |
| | | KPSNTKVDKXVEPKSCDKTHTCPPCPAPELLGGPSVFLFPP |
| | | KPKDTLMI |
| 877. | lightchain | XQSPSSLSASVGDRVTITCRASQSISSNLNWYQQKPGKAPK |
| | | LLIYAISTLQSGVPSRFTGSGSGTEFTLTISHLQPEDFATYYC |
| | | QQSDNTPRTFGQGTKVDVKAPSVFIFPPSDEQLKSGTASVV |
| | | CLLNNFYPREAKVQWKVDNALQSGNSQESVTEQDSKDSTY |
| | | SLSSTLTLSKADYEKHKVYACEVTHQGLSSPVTKSFNRGEC |
| | | *K |
| 878. | VH_nuc | ctgcaggagtcgggcccaggactggtgaagccttcggagaccctgtccctcacctg |
| | | cattgtctctggtggctccatcagtagttattactggggctggatccggcagcccgccg |
| | | ggagggggctggaatggattgggcgtatctttaccagtgggagcaccaactataac |
| | | ccctccctcaagagtcgagtcagcatgtcagtagacacgtccaggaaccagttctcc |
| | | ctgacactgacctctgtgaccgccgcg |
| 879. | VL_nuc | ganccagtctccatcctccctgtctgcatctgtaggagacagagtcaccatcacttgc |
| | | cgggcaagtcagagcattagcagcaatttaaattggtatcagcagaaaccaggga |
| | | aagcccctaaactcctgatctatgccatatccactttgcaaagtggggtcccatcgcg |
| | | gttcactggaagtggatctgggacagaattcactctcaccatcagtcatctgcaacct |
| | | gaagattttgcaacgtactactgtca |
| SEQ ID NO | | 13FU1P2B12 |
| 880. | CDR-H1 | GFIFSDYS |
| 881. | CDR-H2 | IRFDSTTR |
| 882. | CDR-H3 | VKDSGLRTLSD |
| 883. | CDR-L1 | QSLLHSNGYNY |
| 884. | CDR-L2 | MAS |
| 885. | CDR-L3 | MQALQTWT |
| 886. | VH | RCPAVESGGGVVQPGGSVRLSCAASGFIFSDYSMHWVRQ |
| | | APGKGLEWVSFIRFDSTTRDYGDSVKGRFIISRDDSKNTLYL |
| | | QMTSLRPDDTAVYYCVKDSGLRTLSDWGPGTLVTVSS |
| 887. | VL | RCXXTQSPLSLPVTPGEPASISCRCSQSLLHSNGYNYLDWY |
| | | VQKPGQSPQLLIYMASKRASGVPDRFSGSGSGTDFTLKISR |
| | | VEAEDVGVYYCMQALQTWTFGPGTKVEIK |
| 888. | FR-H1 | RCPAVESGGGVVQPGGSVRLSCAAS |
| 889. | FR-H2 | MHWVRQAPGKGLEWVSF |
| 890. | FR-H3 | DYGDSVKGRFIISRDDSKNTLYLQMTSLRPDDTAVYYC |
| 891. | FR-H4 | WGPGTLVTVSS |
| 892. | FR-L1 | RCXXTQSPLSLPVTPGEPASISCRCS |
| 893. | FR-L2 | LDWYVQKPGQSPQLLIY |
| 894. | FR-L3 | KRASGVPDRFSGSGSGTDFTLKISRVEAEDVGVYYC |
| 895. | FR-L4 | FGPGTKVEIK |
| 896. | heavychain | RCPAVESGGGVVQPGGSVRLSCAASGFIFSDYSMHWVRQ |
| | | APGKGLEWVSFIRFDSTTRDYGDSVKGRFIISRDDSKNTLYL |
| | | QMTSLRPDDTAVYYCVKDSGLRTLSDWGPGTLVTVSSKGP |
| | | SVFPLAPSSKSTSGGTAALGXLVKDYFPEPVTVSWNSGALT |
| | | SGVHTFPAVLQSSGLYSLSSVVTVPSSSLGTQTYICNVNHK |
| | | PSNTKVDKXVEPKSCDKTHTCPPCPAPELLGGPSVFLFPPK |
| | | PKDTLMISRTP |
| 897. | lightchain | RCXXTQSPLSLPVTPGEPASISCRCSQSLLHSNGYNYLDWY |
| | | VQKPGQSPQLLIYMASKRASGVPDRFSGSGSGTDFTLKISR |
| | | VEAEDVGVYYCMQALQTWTFGPGTKVEIKAPSVFIFPPSDE |
| | | QLKSGTASVVCLLNNFYPREAKVQWKVDNALQSGNSQESV |
| | | TEQDSKDSTYSLSSTLTLSKADYEKHKVYACEVTHQGLSSP |
| | | VTKSFNRGEC*K |
| 898. | VH_nuc | aggtgcccagcggtggagtctgggggaggcgtggtccagcctggggggtccgtga |
| | | gactctcctgtgcagcgtctggattcatcttcagtgactattccatgcactgggtccgcc |
| | | aggctccaggcaaggggctggagtgggtgtcgtttataagatttgactcaaccacta |
| | | gagattatggagactccgtgaagggccgattcatcatctccagagacgattccaaga |
| | | acacgttgtatctccaaatgaccagc |
| 899. | VL_nuc | cgatgttgnnagactcagtctccactctccctgcccgtcacccctggagagccggcct |
| | | ccatctcctgcaggtgtagtcaaagcctcctgcatagtaatggatacaactatttggatt |
| | | ggtacgtgcagaagccagggcagtctccacaactgctgatctatatggcttctaagc |
| | | gggcctccggggtccctgacaggttcagtggcagtggatcaggcacagactttactc |
| | | tgaaaatcagcagagtggaggct |
| SEQ ID NO | | 27FU1P3A4 |
| 900. | CDR-H1 | GFPFDDFV |
| 901. | CDR-H2 | ISSRRTNT |
| 902. | CDR-H3 | AKGETRYLEWIIQSSGFDY |
| 903. | CDR-L1 | QTISTY |
| 904. | CDR-L2 | AAS |
| 905. | CDR-L3 | QQTYNVPPT |
| 906. | VH | ESGGGLVQPGGSLRLSCVASGFPFDDFVFAWVRQAPGGG |
| | | LEWVSAISSRRTNTFYADSVKGRFTISRDNTRKTVNLQMNS |
| | | LRGEDTAVYYCAKGETRYLEWIIQSSGFDYWGPGTLVAVSS |
| 907. | VL | QSPSSLSASVGERVTITCRANQTISTYLNWYQQKVGKAPKS |
| | | LIRAASSLESGVPSRFSGSGSGTDFTLTINSLQREDFATYYC |
| | | QQTYNVPPTFGQGTRVELK |
| 908. | FR-H1 | ESGGGLVQPGGSLRLSCVAS |
| 909. | FR-H2 | FAWVRQAPGGGLEWVSA |
| 910. | FR-H3 | FYADSVKGRFTISRDNTRKTVNLQMNSLRGEDTAVYYC |
| 911. | FR-H4 | WGPGTLVAVSS |
| 912. | FR-L1 | QSPSSLSASVGERVTITCRAN |
| 913. | FR-L2 | LNWYQQKVGKAPKSLIR |
| 914. | FR-L3 | SLESGVPSRFSGSGSGTDFTLTINSLQREDFATYYC |
| 915. | FR-L4 | FGQGTRVELK |
| 916. | heavychain | ESGGGLVQPGGSLRLSCVASGFPFDDFVFAWVRQAPGGG |
| | | LEWVSAISSRRTNTFYADSVKGRFTISRDNTRKTVNLQMNS |
| | | LRGEDTAVYYCAKGETRYLEWIIQSSGFDYWGPGTLVAVSS |
| | | KGPSVFPLAPSSKSTSGGTAALGXLVKDYFPEPVTVSWNSG |
| | | ALTSGVHTFPAVLQSSGLYSLSSVVTVPSSSLGTQTYICNVN |
| | | HKPSNTKVDKXVEPKSCDKTHTCPPCPAPELLGGPSVFLFP |
| | | PKPKDTLMIS |
| 917. | lightchain | QSPSSLSASVGERVTITCRANQTISTYLNWYQQKVGKAPKS |
| | | LIRAASSLESGVPSRFSGSGSGTDFTLTINSLQREDFATYYC |
| | | QQTYNVPPTFGQGTRVELKAPSVFIFPPSDEQLKSGTASVV |
| | | CLLNNFYPREAKVQWKVDNALQSGNSQESVTEQDSKDSTY |
| | | SLSSTLTLSKADYEKHKVYACEVTHQGLSSPVTKSFNRGEC |
| | | *K |
| 918. | VH_nuc | ggagtctgggggaggcttggtacaaccgggggggtccctaagactctcctgtgtcgc |
| | | ctctggattcccctttgacgactttgtcttcgcctgggtccgccaggctccaggggggg |
| | | gtctggagtgggtctcggctattagtagtcgtagaactaacacgttctacgcagactct |
| | | gtgaagggccgattcaccatctccagagacaataccaggaagacagtgaatctgc |
| | | aaatgaacagcctgagaggcgagga |
| 919. | VL_nuc | ccagtcgccgtcctccctgtctgcatctgtgggagaaagagtcaccatcacttgccgg |
| | | gccaatcagaccataagtacttatttaaattggtatcaacaaaaagtagggaaagcc |
| | | cctaagtccctgatccgtgctgcatccagtttagaaagtggggtcccatcaaggtttag |
| | | tggcagtggatctgggacagacttcactctcaccatcaacagtctgcaacgtgaaga |
| | | ttttgcaacttactactgtcaaca |
| SEQ ID NO | | 27FU1P3A10 |
| 920. | CDR-H1 | GDSIRSYY |
| 921. | CDR-H2 | IFTTGST |
| 922. | CDR-H3 | ARDQTLGRRMDV |
| 923. | CDR-L1 | QDISSW |
| 924. | CDR-L2 | TAS |
| 925. | CDR-L3 | QQGNSFPRT |
| 926. | VH | ESGPGLVKPSETLSLTCTVSGDSIRSYYWSWIRQPAGKGLE |
| | | WVGRIFTTGSTTYNPSLKSRVTMSVDMSKNQISLNLSSVTA |
| | | ADTAVYYCARDQTLGRRMDVWGQGTTVTVSS |
| 927. | VL | XQSPSSVSASVGDRVTITCRASQDISSWLAWYQQKPGKAP |
| | | KLLIYTASSLQSGVPSRFSGSGSGTDFTLTISSLOPEDFATY |
| | | YCQQGNSFPRTFGQGTKVEIK |
| 928. | FR-H1 | ESGPGLVKPSETLSLTCTVS |
| 929. | FR-H2 | WSWIRQPAGKGLEWVGR |
| 930. | FR-H3 | TYNPSLKSRVTMSVDMSKNQISLNLSSVTAADTAVYYC |
| 931. | FR-H4 | WGQGTTVTVSS |
| 932. | FR-L1 | XQSPSSVSASVGDRVTITCRAS |
| 933. | FR-L2 | LAWYQQKPGKAPKLLIY |
| 934. | FR-L3 | SLQSGVPSRFSGSGSGTDFTLTISSLQPEDFATYYC |
| 935. | FR-L4 | FGQGTKVEIK |
| 936. | heavychain | ESGPGLVKPSETLSLTCTVSGDSIRSYYWSWIRQPAGKGLE |
| | | WVGRIFTTGSTTYNPSLKSRVTMSVDMSKNQISLNLSSVTA |
| | | ADTAVYYCARDQTLGRRMDVWGQGTTVTVSSKGPSVFPLA |
| | | PSSKSTSGGTAALGXLVKDYFPEPVTVSWNSGALTSGVHTF |
| | | PAVLQSSGLYSLSSVVTVPSSSLGTQTYICNVNHKPSNTKV |
| | | DKXVEPKSCDKTHTCPPCPAPELLGGPSVFLFPPKPKDTLMI |
| | | SRTPEVTCV |
| 937. | lightchain | XQSPSSVSASVGDRVTITCRASQDISSWLAWYQQKPGKAP |
| | | KLLIYTASSLQSGVPSRFSGSGSGTDFTLTISSLOPEDFATY |
| | | YCQQGNSFPRTFGQGTKVEIKAPSVFIFPPSDEQLKSGTAS |
| | | VVCLLNNFYPREAKVQWKVDNALQSGNSQESVTEQDSKDS |
| | | TYSLSSTLTLSKADYEKHKVYACEVTHQGLSSPVTKSFNRG |
| | | EC*K |
| 938. | VH_nuc | aggagtcgggcccaggactggtgaagccttcggagaccctgtccctcacctgcact |
| | | gtctctggtgactccatcagaagttactactggagttggatccggcagcccgccggg |
| | | aagggactggagtgggttggacgtatctttaccactgggagtaccacctacaacccc |
| | | tccctcaagagtcgagtcaccatgtcagtggatatgtccaagaaccagatctccctga |
| | | acctgagctctgtgaccgccgcggaca |
| 939. | VL_nuc | ganccagtctccatcttctgtgtctgcatctgtcggagacagagtcaccatcacttgtcg |
| | | ggcgagtcaggatattagcagctggttagcctggtatcagcagaagccagggaaa |
| | | gcccctaaactcctgatctatactgcatccagtttgcaaagtggggtcccatcaaggtt |
| | | cagcggcagtggatctgggacagatttcactctcactatcagcagcctgcagcctga |
| | | agattttgcaacttactattgtca |
| SEQ ID NO | | 6BU4P2B1 |
| 940. | CDR-H1 | GFSFDDYA |
| 941. | CDR-H2 | ISWNSGTI |
| 942. | CDR-H3 | AKGTGWELVSALEN |
| 943. | CDR-L1 | QTISDY |
| 944. | CDR-L2 | AAS |
| 945. | CDR-L3 | QQSYSPPFT |
| 946. | VH | VESGGGLIQPGRSLRLSCAVSGFSFDDYAMYWVRQVPGKG |
| | | LEWVSGISWNSGTIEYADSVKGRFTISRDNAKKSLFLEMNSL |
| | | RSEDTAIYYCAKGTGWELVSALENWGQGTVVTVSS |
| 947. | VL | QSPSSLSASVGNKVTITCRASQTISDYLNWYQQKPGKAPKL |
| | | LIYAASSLQSAVPSRFAGSGSGTEFTLTISSLOPEDFATYYC |
| | | QQSYSPPFTFGPGTKVDIK |
| 948. | FR-H1 | VESGGGLIQPGRSLRLSCAVS |
| 949. | FR-H2 | MYWVRQVPGKGLEWVSG |
| 950. | FR-H3 | EYADSVKGRFTISRDNAKKSLFLEMNSLRSEDTAIYYC |
| 951. | FR-H4 | WGQGTVVTVSS |
| 952. | FR-L1 | QSPSSLSASVGNKVTITCRAS |
| 953. | FR-L2 | LNWYQQKPGKAPKLLIY |
| 954. | FR-L3 | SLQSAVPSRFAGSGSGTEFTLTISSLOPEDFATYYC |
| 955. | FR-L4 | FGPGTKVDIK |
| 956. | heavychain | VESGGGLIQPGRSLRLSCAVSGFSFDDYAMYWVRQVPGKG |
| | | LEWVSGISWNSGTIEYADSVKGRFTISRDNAKKSLFLEMNSL |
| | | RSEDTAIYYCAKGTGWELVSALENWGQGTVVTVSSKGPSV |
| | | FPLAPSSKSTSGGTAALGXLVKDYFPEPVTVSWNSGALTSG |
| | | VHTFPAVLQSSGLYSLSSVVTVPSSSLGTQTYICNVNHKPSN |
| | | TKVDKXVEPKSCDKTHTCPPCPAPELLGGPSVFLFPPKPKD |
| | | TLMISRTPE |
| 957. | lightchain | QSPSSLSASVGNKVTITCRASQTISDYLNWYQQKPGKAPKL |
| | | LIYAASSLQSAVPSRFAGSGSGTEFTLTISSLOPEDFATYYC |
| | | QQSYSPPFTFGPGTKVDIKAPSVFIFPPSDEQLKSGTASVVC |
| | | LLNNFYPREAKVQWKVDNALQSGNSQESVTEQDSKDSTYS |
| | | LSSTLTLSKADYEKHKVYACEVTHQGLSSPVTKSFNRGEC* |
| | | K |
| 958. | VH_nuc | gtggaatctgggggaggactgatacagcctggcaggtccctgagactctcctgtgca |
| | | gtctctggattcagttttgatgactatgccatgtactgggtccgacaagttccagggaag |
| | | ggcctggagtgggtctcaggcattagttggaatagtggaactatagagtatgcggact |
| | | ctgtgaagggccgattcaccatttccagagacaacgccaagaagtccctgtttctag |
| | | aaatgaacagtctgagaagcgag |
| 959. | VL_nuc | ccagtctccatcctccctgtctgcatctgtcggaaacaaagtcaccatcacttgccggg |
| | | caagtcagactattagcgactatttaaattggtatcagcaaaaaccagggaaagccc |
| | | ctaaactcctgatctatgccgcgtccagtttgcaaagtgcagtcccatcaaggttcgct |
| | | ggcagtggatctgggacagagttcaccctcaccatcagcagtctgcaacctgaaga |
| | | ttttgcaacttactactgtcaaca |
| SEQ ID NO | | 6BU4P2B11 |
| 960. | CDR-H1 | GFTFDDYA |
| 961. | CDR-H2 | IGWNSGSI |
| 962. | CDR-H3 | AKDIDSSSWWYFES |
| 963. | CDR-L1 | QSLTNNY |
| 964. | CDR-L2 | GAS |
| 965. | CDR-L3 | QKYGTSLT |
| 966. | VH | VESGGNLVQPGRSLRLSCAASGFTFDDYAMHWVRQSPGK |
| | | GLEWVSGIGWNSGSIEYADSVKGRFTISRDNAKNSLYLQMN |
| | | SLRLEDTAVYYCAKDIDSSSWWYFESWGQGTLVTVSS |
| 967. | VL | TQSPGTLSLSPGERVTLSCRASQSLTNNYLAWYQHKPGQA |
| | | PRLLIYGASTRATGIPDRFSGSGSGTDFTLTISRLEPEDLAVY |
| | | YCQKYGTSLTFGGGTKVEIK |
| 968. | FR-H1 | VESGGNLVQPGRSLRLSCAAS |
| 969. | FR-H2 | MHWVRQSPGKGLEWVSG |
| 970. | FR-H3 | EYADSVKGRFTISRDNAKNSLYLQMNSLRLEDTAVYYC |
| 971. | FR-H4 | WGQGTLVTVSS |
| 972. | FR-L1 | TQSPGTLSLSPGERVTLSCRAS |
| 973. | FR-L2 | LAWYQHKPGQAPRLLIY |
| 974. | FR-L3 | TRATGIPDRFSGSGSGTDFTLTISRLEPEDLAVYYC |
| 975. | FR-L4 | FGGGTKVEIK |
| 976. | heavychain | VESGGNLVQPGRSLRLSCAASGFTFDDYAMHWVRQSPGK |
| | | GLEWVSGIGWNSGSIEYADSVKGRFTISRDNAKNSLYLQMN |
| | | SLRLEDTAVYYCAKDIDSSSWWYFESWGQGTLVTVSSKGP |
| | | SVFPLAPSSKSTSGGTAALGXLVKDYFPEPVTVSWNSGALT |
| | | SGVHTFPAVLQSSGLYSLSSVVTVPSSSLGTQTYICNVNHK |
| | | PSNTKVDKXVEPKSCDKTHTCPPCPAPELLGGPSVFLFPPK |
| | | PKDTLMISRTPE |
| 977. | lightchain | TQSPGTLSLSPGERVTLSCRASQSLTNNYLAWYQHKPGQA |
| | | PRLLIYGASTRATGIPDRFSGSGSGTDFTLTISRLEPEDLAVY |
| | | YCQKYGTSLTFGGGTKVEIKAPSVFIFPPSDEQLKSGTASVV |
| | | CLLNNFYPREAKVQWKVDNALQSGNSQESVTEQDSKDSTY |
| | | SLSSTLTLSKADYEKHKVYACEVTHQGLSSPVTKSFNRGEC |
| | | *K |
| 978. | VH_nuc | ggtggagtctgggggaaacttggtacagcctggcaggtccctgagactctcctgtgc |
| | | agcctctggattcacctttgacgactatgccatgcactgggtccggcaaagtccaggg |
| | | aagggcctggagtgggtctcaggtattggttggaacagcggtagcatcgaatatgcg |
| | | gactctgtgaagggccgattcaccatctccagagacaacgccaagaactccctgtat |
| | | ttgcaaatgaacagtctgagacttga |
| 979. | VL_nuc | gacgcagtctccaggcaccctgtctttgtctccaggggaaagagtcaccctctcctgc |
| | | agggccagtcagagtctcaccaacaattacttagcctggtaccaacacaaacctgg |
| | | ccaggctcccaggctactcatctatggtgcatctacccgggccaccggcatcccaga |
| | | caggttcagtggcagtgggtctgggacagacttcactctcaccatcagcagactgga |
| | | gcctgaagatttggcagtatattactg |
| SEQ ID NO | | 6FU1P1A7 |
| 980. | CDR-H1 | GFPFEKFA |
| 981. | CDR-H2 | ISGTGAVT |
| 982. | CDR-H3 | AKDRTPVTNYYGMDV |
| 983. | CDR-L1 | QSISSY |
| 984. | CDR-L2 | AAS |
| 985. | CDR-L3 | QQSYSTPMAT |
| 986. | VH | QVQLVESGGNLGQPGGSLRLSCAASGFPFEKFAINWVRQA |
| | | PGKGLEWVSAISGTGAVTYYADSVEGRFSISRDNSKNTVFL |
| | | EMNSLRVEDTAVYFCAKDRTPVTNYYGMDVWGQGTTVTVS |
| | | S |
| 987. | VL | DIGXTQSPSSLSASVGDRVTITCRASQSISSYLNWYQQKPG |
| | | KAPKLLIYAASSLQSGVPSRFSGSGSGTDFTLTISSLQPEDF |
| | | ATYYCQQSYSTPMATFGGGTKVEIK |
| 988. | FR-H1 | QVQLVESGGNLGQPGGSLRLSCAAS |
| 989. | FR-H2 | INWVRQAPGKGLEWVSA |
| 990. | FR-H3 | YYADSVEGRFSISRDNSKNTVFLEMNSLRVEDTAVYFC |
| 991. | FR-H4 | WGQGTTVTVSS |
| 992. | FR-L1 | DIGXTQSPSSLSASVGDRVTITCRAS |
| 993. | FR-L2 | LNWYQQKPGKAPKLLIY |
| 994. | FR-L3 | SLQSGVPSRFSGSGSGTDFTLTISSLQPEDFATYYC |
| 995. | FR-L4 | FGGGTKVEIK |
| 996. | heavychain | QVQLVESGGNLGQPGGSLRLSCAASGFPFEKFAINWVRQA |
| | | PGKGLEWVSAISGTGAVTYYADSVEGRFSISRDNSKNTVFL |
| | | EMNSLRVEDTAVYFCAKDRTPVTNYYGMDVWGQGTTVTVS |
| | | SKGPSVFPLAPSSKSTSGGTAALGXLVKDYFPEPVTVSWNS |
| | | GALTSGVHTFPAVLQSSGLYSLSSVVTVPSSSLGTQTYICNV |
| | | NHKPSNTKVDKXVEPKSCDKTHTCPPCPAPELLGGPSVFLF |
| | | PPKPKDTLMI |
| 997. | lightchain | DIGXTQSPSSLSASVGDRVTITCRASQSISSYLNWYQQKPG |
| | | KAPKLLIYAASSLQSGVPSRFSGSGSGTDFTLTISSLQPEDF |
| | | ATYYCQQSYSTPMATFGGGTKVEIKAPSVFIFPPSDEQLKS |
| | | GTASVVCLLNNFYPREAKVQWKVDNALQSGNSQESVTEQD |
| | | SKDSTYSLSSTLTLSKADYEKHKVYACEVTHQGLSSPVTKS |
| | | FNRGEC*K |
| 998. | VH_nuc | caggtgcagctggtggagtctgggggaaacttgggacagccgggggggtccctga |
| | | gactgtcctgtgcagcctctggattcccctttgagaagtttgccatcaactgggtccgcc |
| | | aggctccagggaaggggctggagtgggtctcggctattagtggtactggtgctgtca |
| | | catactacgcagactccgtggagggccggttctccatctccagagacaattccaaga |
| | | acacggtgtttctggagatgaacagc |
| 999. | VL_nuc | gacatcggnntgacccagtctccatcctccctgtctgcatctgtaggagacagagtca |
| | | ccatcacttgccgggcaagtcagagcattagcagctatttaaattggtatcagcagaa |
| | | accagggaaagcccctaagctcctgatctatgctgcatccagtttgcaaagtggggt |
| | | cccatcaaggttcagtggcagtggatctgggacagatttcactctcaccatcagcagt |
| | | ctgcaacctgaagattttgcaact |
| SEQ ID NO | | 6FU1P1B9 |
| 1000. | CDR-H1 | GGSFSGYS |
| 1001. | CDR-H2 | FNHSGNT |
| 1002. | CDR-H3 | ARERDCSGGGCYYPYSYYYGMDV |
| 1003. | CDR-L1 | QGISIY |
| 1004. | CDR-L2 | AAS |
| 1005. | CDR-L3 | QQFNSYPRV |
| 1006. | VH | VQLQQWGAGLLKPSETLSLTCAVYGGSFSGYSWSWIRQPP |
| | | GKGLEWIGEFNHSGNTNYTPSLKSRVTISVDMSKNHFSLKL |
| | | SSVTAADTAVYYCARERDCSGGGCYYPYSYYYGMDVWGQ |
| | | GTTVTVSS |
| 1007. | VL | XXTQSPSFLSASVGDRVTITCRASQGISIYLAWYQQNPGKA |
| | | PKLLIYAASTLQSGVPSRFSGSGSGTEFTLTISNLQPEDFAT |
| | | YYCQQFNSYPRVFGGGTKVEIK |
| 1008. | FR-H1 | VQLQQWGAGLLKPSETLSLTCAVY |
| 1009. | FR-H2 | WSWIRQPPGKGLEWIGE |
| 1010. | FR-H3 | NYTPSLKSRVTISVDMSKNHFSLKLSSVTAADTAVYYC |
| 1011. | FR-H4 | WGQGTTVTVSS |
| 1012. | FR-L1 | XXTQSPSFLSASVGDRVTITCRAS |
| 1013. | FR-L2 | LAWYQQNPGKAPKLLIY |
| 1014. | FR-L3 | TLQSGVPSRFSGSGSGTEFTLTISNLQPEDFATYYC |
| 1015. | FR-L4 | FGGGTKVEIK |
| 1016. | heavychain | VQLQQWGAGLLKPSETLSLTCAVYGGSFSGYSWSWIRQPP |
| | | GKGLEWIGEFNHSGNTNYTPSLKSRVTISVDMSKNHFSLKL |
| | | SSVTAADTAVYYCARERDCSGGGCYYPYSYYYGMDVWGQ |
| | | GTTVTVSSKGPSVFPLAPSSKSTSGGTAALGXLVKDYFPEP |
| | | VTVSWNSGALTSGVHTFPAVLQSSGLYSLSSVVTVPSSSLG |
| | | TQTYICNVNHKPSNTKVDKXVEPKSCDKTHTCPPCPAPELL |
| | | GGPSVFLFPPKP |
| 1017. | lightchain | XXTQSPSFLSASVGDRVTITCRASQGISIYLAWYQQNPGKA |
| | | PKLLIYAASTLQSGVPSRFSGSGSGTEFTLTISNLQPEDFAT |
| | | YYCQQFNSYPRVFGGGTKVEIKAPSVFIFPPSDEQLKSGTA |
| | | SVVCLLNNFYPREAKVQWKVDNALQSGNSQESVTEQDSKD |
| | | STYSLSSTLTLSKADYEKHKVYACEVTHQGLSSPVTKSFNR |
| | | GEC*K |
| 1018. | VH_nuc | aggtgcagctgcagcagtggggcgcaggactgttgaagccttcggagaccctgtcc |
| | | ctcacctgcgctgtttatggtgggtccttcagtggttactcctggagctggatccgccag |
| | | cccccagggaaggggctagagtggattggggaattcaatcatagtggaaacacca |
| | | actacaccccgtccctcaagagtcgagtcaccatatcagtagacatgtccaagaac |
| | | cacttctccctgaagctgagctctgtga |
| 1019. | VL_nuc | tnccngnacccagtctccatccttcctgtctgcatctgtaggagacagagtcaccatc |
| | | acttgccgggccagtcagggcattagcatttatttagcctggtatcagcaaaacccag |
| | | ggaaagcccctaagctcctgatctatgctgcatccactttgcaaagtggggtcccatc |
| | | aaggttcagcggcagtgggtctgggacagagttcactctcacaatcagcaacctgc |
| | | agcctgaagattttgcaacttatta |
| SEQ ID NO | | 11FUP1A2 |
| 1020. | CDR-H1 | GFTVEDYT |
| 1021. | CDR-H2 | ISWDGDRT |
| 1022. | CDR-H3 | VKDNGWRSFAY |
| 1023. | CDR-L1 | QSLLHSNGYNY |
| 1024. | CDR-L2 | LGS |
| 1025. | CDR-L3 | MQALQAFT |
| 1026. | VH | ESGGAVVQPGGSLRLSCAASGFTVEDYTIHWVRQVPGKGL |
| | | EWISLISWDGDRTAYTDSVKGRFTISRDNIKNSLYLLMNSLR |
| | | TEDTALYYCVKDNGWRSFAYWGQGILVTVST |
| 1027. | VL | TQSPLSLPVTPGEPASISCRSSQSLLHSNGYNYLDWYLQRP |
| | | GQSPQLLIYLGSKRASGVPDRFSGSGSGTDFTLKISRVEAE |
| | | DVGVYYCMQALQAFTFGPGTKVDIK |
| 1028. | FR-H1 | ESGGAVVQPGGSLRLSCAAS |
| 1029. | FR-H2 | IHWVRQVPGKGLEWISL |
| 1030. | FR-H3 | AYTDSVKGRFTISRDNIKNSLYLLMNSLRTEDTALYYC |
| 1031. | FR-H4 | WGQGILVTVST |
| 1032. | FR-L1 | TQSPLSLPVTPGEPASISCRSS |
| 1033. | FR-L2 | LDWYLQRPGQSPQLLIY |
| 1034. | FR-L3 | KRASGVPDRFSGSGSGTDFTLKISRVEAEDVGVYYC |
| 1035. | FR-L4 | FGPGTKVDIK |
| 1036. | heavychain | ESGGAVVQPGGSLRLSCAASGFTVEDYTIHWVRQVPGKGL |
| | | EWISLISWDGDRTAYTDSVKGRFTISRDNIKNSLYLLMNSLR |
| | | TEDTALYYCVKDNGWRSFAYWGQGILVTVSTKGPSVFPLAP |
| | | SSKSTSGGTAALGXLVKDYFPEPVTVSWNSGALTSGVHTFP |
| | | AVLQSSGLYSLSSVVTVPSSSLGTQTYICNVNHKPSNTKVD |
| | | KXVEPKSCDKTHTCPPCPAPELLGGPSVFLFPPKPKDTLMIS |
| | | RTPEVTCV |
| 1037. | lightchain | TQSPLSLPVTPGEPASISCRSSQSLLHSNGYNYLDWYLQRP |
| | | GQSPQLLIYLGSKRASGVPDRFSGSGSGTDFTLKISRVEAE |
| | | DVGVYYCMQALQAFTFGPGTKVDIKAPSVFIFPPSDEQLKS |
| | | GTASVVCLLNNFYPREAKVQWKVDNALQSGNSQESVTEQD |
| | | SKDSTYSLSSTLTLSKADYEKHKVYACEVTHQGLSSPVTKS |
| | | FNRGEC*K |
| 1038. | VH_nuc | tggagtctgggggagccgtggttcagcctggggggtccctgagactctcctgtgcag |
| | | cctctggattcaccgttgaagattataccatccactgggtccgtcaggttccggggaa |
| | | gggtctggagtggatctctcttattagttgggatggtgatagaacagcgtatacagact |
| | | ctgtgaagggccgattcaccatctcccgagacaacatcaaaaactccctgtatctact |
| | | aatgaacagtctcagaactgagg |
| 1039. | VL_nuc | gactcagtctccactctccctgcccgtcacccctggagagccggcctccatctcctgc |
| | | aggtcaagtcagagtctcctgcatagtaatggatacaactatttggattggtacctgca |
| | | gaggccagggcagtctcctcaactcctgatctatttgggctctaagcgggcctccggg |
| | | gtccctgacaggttcagcggcagtggatcaggcacagattttacactgaaaatcagt |
| | | agagtggaggctgaggacgttgg |
| SEQ ID NO | | 18FU1P1A7 |
| 1040. | CDR-H1 | GFSFNXYA |
| 1041. | CDR-H2 | VSYSGETT |
| 1042. | CDR-H3 | AIGGLALYCSGGSCWH |
| 1043. | CDR-L1 | QGISSY |
| 1044. | CDR-L2 | AAS |
| 1045. | CDR-L3 | QQLNTYPLT |
| 1046. | VH | GXGXXXXGXSLXXSCAASGFSFNXYAMSWVRQAPGKGLD |
| | | WVATVSYSGETTHYAESVKGRFTISRDNSENTVSLQMNSLR |
| | | AEDSAAYYCAIGGLALYCSGGSCWHWGQGTLVTVSP |
| 1047. | VL | TQSPSFLSASVGDRVTITCRASQGISSYLAWYQQKPGKAPK |
| | | LLIYAASTLONGVPSRFSGGGSGTEFTLTISSLOPEDFATYY |
| | | CQQLNTYPLTFGGGTKVEIK |
| 1048. | FR-H1 | GXGXXXXGXSLXXSCAAS |
| 1049. | FR-H2 | MSWVRQAPGKGLDWVAT |
| 1050. | FR-H3 | HYAESVKGRFTISRDNSENTVSLQMNSLRAEDSAAYYC |
| 1051. | FR-H4 | WGQGTLVTVSP |
| 1052. | FR-L1 | TQSPSFLSASVGDRVTITCRAS |
| 1053. | FR-L2 | LAWYQQKPGKAPKLLIY |
| 1054. | FR-L3 | TLQNGVPSRFSGGGSGTEFTLTISSLOPEDFATYYC |
| 1055. | FR-L4 | FGGGTKVEIK |
| 1056. | heavychain | GXGXXXXGXSLXXSCAASGFSFNXYAMSWVRQAPGKGLD |
| | | WVATVSYSGETTHYAESVKGRFTISRDNSENTVSLQMNSLR |
| | | AEDSAAYYCAIGGLALYCSGGSCWHWGQGTLVTVSPKGPS |
| | | VFPLAPSSKSTSGGTAALGXLVKDYFPEPVTVSWNSGALTS |
| | | GVHTFPAVLQSSGLYSLSSVVTVPSSSLGTQTYICNVNHKP |
| | | SNTKVDKXVEPKSCDKTHTCPPCPAPELLGGPSVFLFPPKP |
| | | KDTLMISRTPEV |
| 1057. | lightchain | TQSPSFLSASVGDRVTITCRASQGISSYLAWYQQKPGKAPK |
| | | LLIYAASTLONGVPSRFSGGGSGTEFTLTISSLOPEDFATYY |
| | | CQQLNTYPLTFGGGTKVEIKAPSVFIFPPSDEQLKSGTASVV |
| | | CLLNNFYPREAKVQWKVDNALQSGNSQESVTEQDSKDSTY |
| | | SLSSTLTLSKADYEKHKVYACEVTHQGLSSPVTKSFNRGEC |
| | | *K |
| 1058. | VH_nuc | wgggkgaggmktsgkwcascmkgggkggtccctganastctcmtgtgcagcct |
| | | ctggattctcctttaacwactatgccatgagctgggtccgccaggctccagggaagg |
| | | ggctggactgggtcgcaacggttagttatagtggtgaaaccacacactacgcagaat |
| | | ccgtgaagggccggttcaccatctccagagacaattccgagaacacggtgtctctgc |
| | | agatgaacagcctgagagccgaggactcggc |
| 1059. | VL_nuc | acccagtctccatccttcctgtctgcatctgtgggagacagagtcaccatcacttgccg |
| | | ggccagtcagggcattagcagttatttagcctggtatcagcaaaaaccagggaaag |
| | | cccctaagctcctgatctatgctgcatccactttgcaaaatggggtcccatcaaggttc |
| | | agcggcggtggatctgggacagagttcactctcacaatcagcagcctgcagcctga |
| | | agattttgcaacttattactgtcaa |
| SEQ ID NO | | 23FUP1A8 |
| 1060. | CDR-H1 | GFTFDNYA |
| 1061. | CDR-H2 | ISRRSDNL |
| 1062. | CDR-H3 | VRDRETSLMFDFDY |
| 1063. | CDR-L1 | QSIDKY |
| 1064. | CDR-L2 | AAF |
| 1065. | CDR-L3 | QQTYSTRCS |
| 1066. | VH | VESGGGVVQPGRSLRLSCVASGFTFDNYAMHWVRQAPGK |
| | | GLEWVSGISRRSDNLDYADSVKGRFTISRDNAKNSLYLQMN |
| | | SLHQGXIXXXYCVRDRETSLMFDFDYWGQGSLVTVSS |
| 1067. | VL | QSPSSLSASVGDSVTITCRASQSIDKYLNWYQQRPGKAPKL |
| | | LIYAAFSLQSGVPSRFSGSGSGTDFTLTIGGLQPEDIATYYC |
| | | QQTYSTRCSFGQGTKLEIK |
| 1068. | FR-H1 | VESGGGVVQPGRSLRLSCVAS |
| 1069. | FR-H2 | MHWVRQAPGKGLEWVSG |
| 1070. | FR-H3 | DYADSVKGRFTISRDNAKNSLYLQMNSLHQGXIXXXYC |
| 1071. | FR-H4 | WGQGSLVTVSS |
| 1072. | FR-L1 | QSPSSLSASVGDSVTITCRAS |
| 1073. | FR-L2 | LNWYQQRPGKAPKLLIY |
| 1074. | FR-L3 | SLQSGVPSRFSGSGSGTDFTLTIGGLQPEDIATYYC |
| 1075. | FR-L4 | FGQGTKLEIK |
| 1076. | heavychain | VESGGGVVQPGRSLRLSCVASGFTFDNYAMHWVRQAPGK |
| | | GLEWVSGISRRSDNLDYADSVKGRFTISRDNAKNSLYLQMN |
| | | SLHQGXIXXXYCVRDRETSLMFDFDYWGQGSLVTVSSKGP |
| | | SVFPLAPSSKSTSGGTAALGXLVKDYFPEPVTVSWNSGALT |
| | | SGVHTFPAVLQSSGLYSLSSVVTVPSSSLGTQTYICNVNHK |
| | | PSNTKVDKXVEPKSCDKTHTCPPCPAPELLGGPSVFLFPPK |
| | | PKDTLMISRTPE |
| 1077. | lightchain | QSPSSLSASVGDSVTITCRASQSIDKYLNWYQQRPGKAPKL |
| | | LIYAAFSLQSGVPSRFSGSGSGTDFTLTIGGLQPEDIATYYC |
| | | QQTYSTRCSFGQGTKLEIKAPSVFIFPPSDEQLKSGTASVVC |
| | | LLNNFYPREAKVQWKVDNALQSGNSQESVTEQDSKDSTYS |
| | | LSSTLTLSKADYEKHKVYACEVTHQGLSSPVTKSFNRGEC* |
| | | K |
| 1078. | VH_nuc | ggtggaatctgggggaggcgtggtacagccgggcaggtccctgagactctcctgtgt |
| | | cgcctctggattcacctttgataattatgccatgcactgggtccggcaagctccaggga |
| | | agggcctggagtgggtctcaggtattagtcggagaagtgataaccttgactacgcgg |
| | | actctgtgaagggccgattcaccatctccagagacaatgccaagaactccctgtatct |
| | | gcaaatgaacagcctccaccaagg |
| 1079. | VL_nuc | ccagtctccatcctccctgtctgcatctgtaggagacagcgtcaccatcacttgccggg |
| | | caagtcagagcattgataagtatttaaattggtatcaacagagaccaggaaaagcc |
| | | cctaaactcctcatctatgctgcattcagtttacaaagtggagtcccttcaaggttcagt |
| | | ggcagtggatctgggacagatttcactctcaccatcggcggtctgcaacctgaagat |
| | | attgcaacttactactgtcagca |
| SEQ ID NO | | 23FUP1B8 |
| 1080. | CDR-H1 | GFIFDDYS |
| 1081. | CDR-H2 | IKWNGEST |
| 1082. | CDR-H3 | VKDGGLRYXQH |
| 1083. | CDR-L1 | QSLLHSNGYMY |
| 1084. | CDR-L2 | LGS |
| 1085. | CDR-L3 | MQSLKSFT |
| 1086. | VH | XXVESGGDVVQPGGSLRLSCAASGFIFDDYSMHWVRQGP |
| | | GKTLEWVSLIKWNGESTSYADSVKGRFTISRDNTKSALYLE |
| | | MSNLRPDDTAFYYCVKDGGLRYXQHWGRGTLVTVSS |
| 1087. | VL | TQSPLSLPVTPGEPASISCRSSQSLLHSNGYMYLDWYLQKP |
| | | GQSPRLLIYLGSNRASGVPDRFSGSGSGTDFTLKISRVEAE |
| | | DVGVYFCMQSLKSFTFGPGTKVDIK |
| 1088. | FR-H1 | XXVESGGDVVQPGGSLRLSCAAS |
| 1089. | FR-H2 | MHWVRQGPGKTLEWVSL |
| 1090. | FR-H3 | SYADSVKGRFTISRDNTKSALYLEMSNLRPDDTAFYYC |
| 1091. | FR-H4 | WGRGTLVTVSS |
| 1092. | FR-L1 | TQSPLSLPVTPGEPASISCRSS |
| 1093. | FR-L2 | LDWYLQKPGQSPRLLIY |
| 1094. | FR-L3 | NRASGVPDRFSGSGSGTDFTLKISRVEAEDVGVYFC |
| 1095. | FR-L4 | FGPGTKVDIK |
| 1096. | heavychain | XXVESGGDVVQPGGSLRLSCAASGFIFDDYSMHWVRQGP |
| | | GKTLEWVSLIKWNGESTSYADSVKGRFTISRDNTKSALYLE |
| | | MSNLRPDDTAFYYCVKDGGLRYXQHWGRGTLVTVSSKGP |
| | | SVFPLAPSSKSTSGGTAALGXLVKDYFPEPVTVSWNSGALT |
| | | SGVHTFPAVLQSSGLYSLSSVVTVPSSSLGTQTYICNVNHK |
| | | PSNTKVDKXVEPKSCDKTHTCPPCPAPELLGGPSVFLFPPK |
| | | PKDTLMISRTPEV |
| 1097. | lightchain | TQSPLSLPVTPGEPASISCRSSQSLLHSNGYMYLDWYLQKP |
| | | GQSPRLLIYLGSNRASGVPDRFSGSGSGTDFTLKISRVEAE |
| | | DVGVYFCMQSLKSFTFGPGTKVDIKAPSVFIFPPSDEQLKSG |
| | | TASVVCLLNNFYPREAKVQWKVDNALQSGNSQESVTEQDS |
| | | KDSTYSLSSTLTLSKADYEKHKVYACEVTHQGLSSPVTKSF |
| | | NRGEC*K |
| 1098. | VH_nuc | ccangnnngtggaatcggggggagacgtggttcagcctggggggtccctgagact |
| | | ctcctgtgcagcctctggattcatctttgatgattactccatgcactgggtccgtcaaggt |
| | | ccggggaagactctggagtgggtctctctcataaaatggaatggtgaaagcacttcct |
| | | acgcagactctgtgaagggtcgattcaccatctccagagacaacaccaaaagcgc |
| | | cctttatctggaaatgagcaatctga |
| 1099. | VL_nuc | agactcagtctccactctccctgcccgtcacccctggagagccggcctccatctcctg |
| | | caggtctagtcagagcctcctgcatagtaatggatacatgtatttggattggtacctgca |
| | | aaagccagggcagtctccacgcctcctgatctatttgggttctaatcgggcctccggg |
| | | gtccctgacaggttcagtggcagtggatcaggcacagattttacactgaaaatcagc |
| | | agagtggaggctgaggatgttg |
| SEQ ID NO | | 23FUP1C4 |
| 1100. | CDR-H1 | GFTFDDFT |
| 1101. | CDR-H2 | INWDGRRT |
| 1102. | CDR-H3 | VKDGGLRYFQY |
| 1103. | CDR-L1 | QSLVHRNGYNY |
| 1104. | CDR-L2 | LGS |
| 1105. | CDR-L3 | MQSLETFT |
| 1106. | VH | ARXVESGGVVVQPGGSLRLLCAASGFTFDDFTMHWVRQSP |
| | | GKGLEWVSLINWDGRRTEYADSVKGRFSISRDSSQNSLYL |
| | | QMNSLKTEDTALYYCVKDGGLRYFQYWGRGTLVTVSS |
| 1107. | VL | TQSPLSLPVTPGEPASISCRSSQSLVHRNGYNYLDWYLQKP |
| | | GQSPQLLIYLGSKRASGVPDRFSGSGSGTDFTLKISRVEAE |
| | | DVGVYYCMQSLETFTFGPGTKVEIK |
| 1108. | FR-H1 | ARXVESGGVVVQPGGSLRLLCAAS |
| 1109. | FR-H2 | MHWVRQSPGKGLEWVSL |
| 1110. | FR-H3 | EYADSVKGRFSISRDSSQNSLYLQMNSLKTEDTALYYC |
| 1111. | FR-H4 | WGRGTLVTVSS |
| 1112. | FR-L1 | TQSPLSLPVTPGEPASISCRSS |
| 1113. | FR-L2 | LDWYLQKPGQSPQLLIY |
| 1114. | FR-L3 | KRASGVPDRFSGSGSGTDFTLKISRVEAEDVGVYYC |
| 1115. | FR-L4 | FGPGTKVEIK |
| 1116. | heavychain | ARXVESGGVVVQPGGSLRLLCAASGFTFDDFTMHWVRQSP |
| | | GKGLEWVSLINWDGRRTEYADSVKGRFSISRDSSQNSLYL |
| | | QMNSLKTEDTALYYCVKDGGLRYFQYWGRGTLVTVSSKGP |
| | | SVFPLAPSSKSTSGGTAALGXLVKDYFPEPVTVSWNSGALT |
| | | SGVHTFPAVLQSSGLYSLSSVVTVPSSSLGTQTYICNVNHK |
| | | PSNTKVDKXVEPKSCDKTHTCPPCPAPELLGGPSVFLFPPK |
| | | PKDTLMISRTPE |
| 1117. | lightchain | TQSPLSLPVTPGEPASISCRSSQSLVHRNGYNYLDWYLQKP |
| | | GQSPQLLIYLGSKRASGVPDRFSGSGSGTDFTLKISRVEAE |
| | | DVGVYYCMQSLETFTFGPGTKVEIKAPSVFIFPPSDEQLKSG |
| | | TASVVCLLNNFYPREAKVQWKVDNALQSGNSQESVTEQDS |
| | | KDSTYSLSSTLTLSKADYEKHKVYACEVTHQGLSSPVTKSF |
| | | NRGEC*K |
| 1118. | VH_nuc | tgccaggnnngtggagtctgggggagtcgtggtacagccgggggggtccctgaga |
| | | ctcttgtgtgcagcctctggattcacctttgatgattttaccatgcactgggtccgacaaa |
| | | gtccggggaagggtctcgagtgggtctcccttattaattgggatggtcgcagaacag |
| | | aatatgcagactctgtgaagggccgattttccatctccagagacagcagccaaaact |
| | | ccctctatctacaaatgaacagtct |
| 1119. | VL_nuc | gactcagtctccgctctccctgcccgtcacccctggagagccggcctccatctcctgc |
| | | aggtctagtcagagcctcgtgcatagaaatggatacaactacttggattggtacctgc |
| | | agaagccagggcagtctccacagctcctgatctatttgggttctaagcgagcctccgg |
| | | ggtccctgacaggttcagtggcagtggatcaggcacagattttacactgaaaatcag |
| | | cagagtggaggctgaggatgttgg |
| SEQ ID NO | | 23FUP1C10 |
| 1120. | CDR-H1 | GYTLTRYD |
| 1121. | CDR-H2 | MNPKSGGS |
| 1122. | CDR-H3 | ARAVDLDN |
| 1123. | CDR-L1 | QSLLDTSNNNNY |
| 1124. | CDR-L2 | WAS |
| 1125. | CDR-L3 | LQYYSLPHT |
| 1126. | VH | VQXVQSGAEVKKPGASVKVSCKASGYTLTRYDINWVRQAT |
| | | GQGLEWMGWMNPKSGGSGSAQRFQGRVTMTWNNSISTA |
| | | YMELSTLRSDDTAVYYCARAVDLDNWGQGTLVIVSS |
| 1127. | VL | TQSPDSLPVSLGERATINCKSSQSLLDTSNNNNYLGWYQQK |
| | | PGQPPKLLFYWASARESGVPDRFSGGGSGTDFTLTISSLQA |
| | | EDVAVYYCLQYYSLPHTFGGGTKVEIK |
| 1128. | FR-H1 | VQXVQSGAEVKKPGASVKVSCKAS |
| 1129. | FR-H2 | INWVRQATGQGLEWMGW |
| 1130. | FR-H3 | GSAQRFQGRVTMTWNNSISTAYMELSTLRSDDTAVYYC |
| 1131. | FR-H4 | WGQGTLVIVSS |
| 1132. | FR-L1 | TQSPDSLPVSLGERATINCKSS |
| 1133. | FR-L2 | LGWYQQKPGQPPKLLFY |
| 1134. | FR-L3 | ARESGVPDRFSGGGSGTDFTLTISSLQAEDVAVYYC |
| 1135. | FR-L4 | FGGGTKVEIK |
| 1136. | heavychain | VQXVQSGAEVKKPGASVKVSCKASGYTLTRYDINWVRQAT |
| | | GQGLEWMGWMNPKSGGSGSAQRFQGRVTMTWNNSISTA |
| | | YMELSTLRSDDTAVYYCARAVDLDNWGQGTLVIVSSKGPSV |
| | | FPLAPSSKSTSGGTAALGXLVKDYFPEPVTVSWNSGALTSG |
| | | VHTFPAVLQSSGLYSLSSVVTVPSSSLGTQTYICNVNHKPSN |
| | | TKVDKXVEPKSCDKTHTCPPCPAPELLGGPSVFLFPPKPKD |
| | | TLMISRTPEVTC |
| 1137. | lightchain | TQSPDSLPVSLGERATINCKSSQSLLDTSNNNNYLGWYQQK |
| | | PGQPPKLLFYWASARESGVPDRFSGGGSGTDFTLTISSLQA |
| | | EDVAVYYCLQYYSLPHTFGGGTKVEIKAPSVFIFPPSDEQLK |
| | | SGTASVVCLLNNFYPREAKVQWKVDNALQSGNSQESVTEQ |
| | | DSKDSTYSLSSTLTLSKADYEKHKVYACEVTHQGLSSPVTK |
| | | SFNRGEC*K |
| 1138. | VH_nuc | gtgcaagnngtgcagtctggggctgaggtgaagaagcctggggcctcagtgaagg |
| | | tctcctgcaaggcttctggatacaccctcaccagatacgatatcaactgggtacgaca |
| | | ggccactggccaaggacttgagtggatgggatggatgaaccctaaaagtgggggc |
| | | agtggctctgcacagagattccagggcagagtcaccatgacctggaacaattccat |
| | | aagcacagcctacatggagctgagcaccctg |
| 1139. | VL_nuc | agacccagtctccagactccctgcctgtgtctctgggcgagagggccaccatcaact |
| | | gcaagtccagccagagtcttttagacacctccaacaacaacaactacttaggttggt |
| | | accagcagaaaccaggacagcctccaaaattgctcttttactgggcatctgcccggg |
| | | aatccggggtccctgaccgattcagtggcggcgggtctgggacagatttcactctcac |
| | | catcagcagcctgcaggctgaagatg |
| SEQ ID NO | | 23FUP1D6 |
| 1140. | CDR-H1 | GFTFDDYT |
| 1141. | CDR-H2 | IRYDGTRR |
| 1142. | CDR-H3 | VKDGGLRYFDY |
| 1143. | CDR-L1 | QSLLHSNGIHY |
| 1144. | CDR-L2 | LGS |
| 1145. | CDR-L3 | MQSLQTFT |
| 1146. | VH | GAXXVESGGDVVQPGGSLRLSCEASGFTFDDYTMHWVRQI |
| | | PGKSLEWLSLIRYDGTRREYADSVKGRFTISRDNSKNSLFLH |
| | | MNSLKTDDSGFYYCVKDGGLRYFDYWGQGALVTVSS |
| 1147. | VL | TQSPLSLSVTPGEPASISCRSSQSLLHSNGIHYLDWYLQKP |
| | | GQSPQLLIYLGSKRASGVPDRFSGSGSGTDFTLKISRVEAE |
| | | DVGVYYCMQSLQTFTFGPGTKVDIK |
| 1148. | FR-H1 | GAXXVESGGDVVQPGGSLRLSCEAS |
| 1149. | FR-H2 | MHWVRQIPGKSLEWLSL |
| 1150. | FR-H3 | EYADSVKGRFTISRDNSKNSLFLHMNSLKTDDSGFYYC |
| 1151. | FR-H4 | WGQGALVTVSS |
| 1152. | FR-L1 | TQSPLSLSVTPGEPASISCRSS |
| 1153. | FR-L2 | LDWYLQKPGQSPQLLIY |
| 1154. | FR-L3 | KRASGVPDRFSGSGSGTDFTLKISRVEAEDVGVYYC |
| 1155. | FR-L4 | FGPGTKVDIK |
| 1156. | heavychain | GAXXVESGGDVVQPGGSLRLSCEASGFTFDDYTMHWVRQI |
| | | PGKSLEWLSLIRYDGTRREYADSVKGRFTISRDNSKNSLFLH |
| | | MNSLKTDDSGFYYCVKDGGLRYFDYWGQGALVTVSSKGP |
| | | SVFPLAPSSKSTSGGTAALGXLVKDYFPEPVTVSWNSGALT |
| | | SGVHTFPAVLQSSGLYSLSSVVTVPSSSLGTQTYICNVNHK |
| | | PSNTKVDKXVEPKSCDKTHTCPPCPAPELLGGPSVFLFPPK |
| | | PKDTLMISRTP |
| 1157. | lightchain | TQSPLSLSVTPGEPASISCRSSQSLLHSNGIHYLDWYLQKP |
| | | GQSPQLLIYLGSKRASGVPDRFSGSGSGTDFTLKISRVEAE |
| | | DVGVYYCMQSLQTFTFGPGTKVDIKAPSVFIFPPSDEQLKS |
| | | GTASVVCLLNNFYPREAKVQWKVDNALQSGNSQESVTEQD |
| | | SKDSTYSLSSTLTLSKADYEKHKVYACEVTHQGLSSPVTKS |
| | | FNRGEC*K |
| 1158. | VH_nuc | ggtgcccannnggtggagtctgggggagacgtggtgcagcctggggggtccctga |
| | | gactctcctgtgaagcctctggattcacctttgatgattatactatgcactgggtccgtca |
| | | aattccggggaagagtctggagtggctctctcttattcgttacgacgggactaggaga |
| | | gaatatgcagactccgtgaagggtcgattcaccatctccagagacaacagcaaaa |
| | | actccctgtttctgcacatgaacagt |
| 1159. | VL_nuc | agactcagtcaccactctccctgtccgtcacccctggagagccggcctccatctcctg |
| | | caggtcaagtcagagcctcctgcacagtaatggaatccactatttggattggtacctg |
| | | cagaagccagggcagtctccacagctcctgatctatttgggttctaaacgggcctccg |
| | | gggtccctgacaggttcagtggcagtggatcaggcacagattttacactgaaaatca |
| | | gcagagtggaggctgaggatgttg |
| SEQ ID NO | | 23FUP1D7 |
| 1160. | CDR-H1 | GFYIGGSS |
| 1161. | CDR-H2 | IRSFSHAFAT |
| 1162. | CDR-H3 | TRPFRGYDLSSDFYPD |
| 1163. | CDR-L1 | QTISGGS |
| 1164. | CDR-L2 | DAS |
| 1165. | CDR-L3 | QQYSESPQT |
| 1166. | VH | GASLKLSCAVSGFYIGGSSIHWVRQTPGRGLEWLGRIRSFS |
| | | HAFATAYTPSLRGRITISTNESQNTAFLVLTSLSRDDTAIYYC |
| | | TRPFRGYDLSSDFYPDWGQGTLVTVSS |
| 1167. | VL | TQSPGTLSLSPGEGATLSCRASQTISGGSLAWYQQRPGLA |
| | | PRLLMYDASTRATGIPKRFSGSGSGTDFTLTISRLEPEDFAV |
| | | YYCQQYSESPQTFGQGTKVEIK |
| 1168. | FR-H1 | GASLKLSCAVS |
| 1169. | FR-H2 | IHWVRQTPGRGLEWLGR |
| 1170. | FR-H3 | AYTPSLRGRITISTNESQNTAFLVLTSLSRDDTAIYYC |
| 1171. | FR-H4 | WGQGTLVTVSS |
| 1172. | FR-L1 | TQSPGTLSLSPGEGATLSCRAS |
| 1173. | FR-L2 | LAWYQQRPGLAPRLLMY |
| 1174. | FR-L3 | TRATGIPKRFSGSGSGTDFTLTISRLEPEDFAVYYC |
| 1175. | FR-L4 | FGQGTKVEIK |
| 1176. | heavychain | GASLKLSCAVSGFYIGGSSIHWVRQTPGRGLEWLGRIRSFS |
| | | HAFATAYTPSLRGRITISTNESQNTAFLVLTSLSRDDTAIYYC |
| | | TRPFRGYDLSSDFYPDWGQGTLVTVSSKGPSVFPLAPSSK |
| | | STSGGTAALGXLVKDYFPEPVTVSWNSGALTSGVHTFPAVL |
| | | QSSGLYSLSSVVTVPSSSLGTQTYICNVNHKPSNTKVDKXV |
| | | EPKSCDKTHTCPPCPAPELLGGPSVFLFPPKPKDTLMISRTP |
| | | EVTCVVV |
| 1177. | lightchain | TQSPGTLSLSPGEGATLSCRASQTISGGSLAWYQQRPGLA |
| | | PRLLMYDASTRATGIPKRFSGSGSGTDFTLTISRLEPEDFAV |
| | | YYCQQYSESPQTFGQGTKVEIKAPSVFIFPPSDEQLKSGTA |
| | | SVVCLLNNFYPREAKVQWKVDNALQSGNSQESVTEQDSKD |
| | | STYSLSSTLTLSKADYEKHKVYACEVTHQGLSSPVTKSFNR |
| | | GEC*K |
| 1178. | VH_nuc | ggtgcatccctcaaactctcctgtgcagtgtcgggattctacattggcggctcgtccata |
| | | cactgggtccgccagactcccgggagagggctggagtggcttggccgaataagaa |
| | | gcttttctcacgcttttgcgacggcctatactccgtcgctgaggggcaggatcaccattt |
| | | ccacaaatgagtcgcagaacacggcctttttggtgctgaccagcctgagtcgggac |
| | | gacacggccatttactactgtact |
| 1179. | VL_nuc | gacgcagtctccaggcaccctgtctttgtctccaggggaaggcgccaccctctcatgt |
| | | agggccagtcagactattagtggcggctctttagcctggtatcaacaaagacctggc |
| | | ctggcgcccaggctcctcatgtatgacgcgtccaccagggccactggcatcccaaa |
| | | gagattcagtggcagtgggtccgggacagacttcacgctcacaattagcagactgg |
| | | agcctgaagattttgcagtatattactg |
| SEQ ID NO | | 23FUP1D8 |
| 1180. | CDR-H1 | GFTLTTYA |
| 1181. | CDR-H2 | MSKDGSAT |
| 1182. | CDR-H3 | ARDTQDWPTLPHHFYGMDV |
| 1183. | CDR-L1 | QDIKNY |
| 1184. | CDR-L2 | DAS |
| 1185. | CDR-L3 | QQYDNLPLT |
| 1186. | VH | WXXVESGGGVVQPGRSLTISCEVSGFTLTTYAVHWVRQAP |
| | | GKGLEWVAVMSKDGSATYYAGSVRGRFTISRDISKKMMYL |
| | | EMNSLRGEDTGVYYCARDTQDWPTLPHHFYGMDVWGQG |
| | | TTVIVSS |
| 1187. | VL | DIVMTQSPSSLSASVGDRVTITCQASQDIKNYLNWYQQKPG |
| | | KPPKFLIYDASSLETGVPSRFSGSGSGTDFTLTINSLQPEDIA |
| | | TYYCQQYDNLPLTFGGGTKVEIK |
| 1188. | FR-H1 | WXXVESGGGVVQPGRSLTISCEVS |
| 1189. | FR-H2 | VHWVRQAPGKGLEWVAV |
| 1190. | FR-H3 | YYAGSVRGRFTISRDISKKMMYLEMNSLRGEDTGVYYC |
| 1191. | FR-H4 | WGQGTTVIVSS |
| 1192. | FR-L1 | DIVMTQSPSSLSASVGDRVTITCQAS |
| 1193. | FR-L2 | LNWYQQKPGKPPKFLIY |
| 1194. | FR-L3 | SLETGVPSRFSGSGSGTDFTLTINSLQPEDIATYYC |
| 1195. | FR-L4 | FGGGTKVEIK |
| 1196. | heavychain | WXXVESGGGVVQPGRSLTISCEVSGFTLTTYAVHWVRQAP |
| | | GKGLEWVAVMSKDGSATYYAGSVRGRFTISRDISKKMMYL |
| | | EMNSLRGEDTGVYYCARDTQDWPTLPHHFYGMDVWGQG |
| | | TTVIVSSKGPSVFPLAPSSKSTSGGTAALGXLVKDYFPEPVT |
| | | VSWNSGALTSGVHTFPAVLQSSGLYSLSSVVTVPSSSLGTQ |
| | | TYICNVNHKPSNTKVDKXVEPKSCDKTHTCPPCPAPELLGG |
| | | PSVFLFPPKPKDT |
| 1197. | lightchain | DIVMTQSPSSLSASVGDRVTITCQASQDIKNYLNWYQQKPG |
| | | KPPKFLIYDASSLETGVPSRFSGSGSGTDFTLTINSLQPEDIA |
| | | TYYCQQYDNLPLTFGGGTKVEIKAPSVFIFPPSDEQLKSGTA |
| | | SVVCLLNNFYPREAKVQWKVDNALQSGNSQESVTEQDSKD |
| | | STYSLSSTLTLSKADYEKHKVYACEVTHQGLSSPVTKSFNR |
| | | GEC*K |
| 1198. | VH_nuc | gtggnnnnnngtngagtctgggggaggcgtggtccagcctgggaggtccctgaca |
| | | atctcctgtgaagtctctggattcaccctcacaacttatgctgtccactgggtccgccag |
| | | gctccaggcaaggggctggagtgggtggcagttatgtcaaaagatggaagcgcga |
| | | catattatgcaggctccgtgaggggccgattcaccatctccagagacatttccaaga |
| | | aaatgatgtatttggaaatgaacagcct |
| 1199. | VL_nuc | gacatcgtgatgacccagtctccatcctccctgtctgcatctgtaggagacagagtca |
| | | ccatcacttgccaggcgagtcaagacattaagaactatttaaattggtatcagcagaa |
| | | accagggaaaccccctaagttcctcatctacgatgcatccagtttggaaacgggggt |
| | | cccatcaaggttcagtggaagtggatctgggacagattttactctcaccatcaacagc |
| | | ctgcagcctgaagatattgcaaca |
| SEQ ID NO | | 23FUP1D12 |
| 1200. | CDR-H1 | GFTFDDYT |
| 1201. | CDR-H2 | ISWKNHSL |
| 1202. | CDR-H3 | AKDNGFRSFDS |
| 1203. | CDR-L1 | QSLLHSNGYKY |
| 1204. | CDR-L2 | MGS |
| 1205. | CDR-L3 | MQALQTPWT |
| 1206. | VH | CXXXESGGGLVQPGRXLRLSCAASGFTFDDYTMHWVRQV |
| | | PGKGLEWVSGISWKNHSLGYADSVKGRFTISRDNAKNSLYL |
| | | QMNSLRSEDTALYYCAKDNGFRSFDSWGQGTLVTVSS |
| 1207. | VL | TQSPLSLAVTPGEPASISCRSSQSLLHSNGYKYLDWYLQKP |
| | | GQSPQLLIYMGSNRASGVPDRFSVSGSGTDFTLKISRVEAA |
| | | DVGVYYCMQALQTPWTFGQGTKVEIK |
| 1208. | FR-H1 | CXXXESGGGLVQPGRXLRLSCAAS |
| 1209. | FR-H2 | MHWVRQVPGKGLEWVSG |
| 1210. | FR-H3 | GYADSVKGRFTISRDNAKNSLYLQMNSLRSEDTALYYC |
| 1211. | FR-H4 | WGQGTLVTVSS |
| 1212. | FR-L1 | TQSPLSLAVTPGEPASISCRSS |
| 1213. | FR-L2 | LDWYLQKPGQSPQLLIY |
| 1214. | FR-L3 | NRASGVPDRFSVSGSGTDFTLKISRVEAADVGVYYC |
| 1215. | FR-L4 | FGQGTKVEIK |
| 1216. | heavychain | CXXXESGGGLVQPGRXLRLSCAASGFTFDDYTMHWVRQV |
| | | PGKGLEWVSGISWKNHSLGYADSVKGRFTISRDNAKNSLYL |
| | | QMNSLRSEDTALYYCAKDNGFRSFDSWGQGTLVTVSSKGP |
| | | SVFPLAPSSKSTSGGTAALGXLVKDYFPEPVTVSWNSGALT |
| | | SGVHTFPAVLQSSGLYSLSSVVTVPSSSLGTQTYICNVNHK |
| | | PSNTKVDKXVEPKSCDKTHTCPPCPAPELLGGPSVFLFPPK |
| | | PKDTLMISRTPE |
| 1217. | lightchain | TQSPLSLAVTPGEPASISCRSSQSLLHSNGYKYLDWYLQKP |
| | | GQSPQLLIYMGSNRASGVPDRFSVSGSGTDFTLKISRVEAA |
| | | DVGVYYCMQALQTPWTFGQGTKVEIKAPSVFIFPPSDEQLK |
| | | SGTASVVCLLNNFYPREAKVQWKVDNALQSGNSQESVTEQ |
| | | DSKDSTYSLSSTLTLSKADYEKHKVYACEVTHQGLSSPVTK |
| | | SFNRGEC*K |
| 1218. | VH_nuc | gtgccannnnnnggagtctgggggaggcttggttcagcctggcaggtscctgagac |
| | | tctcctgtgcagcctctggattcacctttgatgattataccatgcactgggtccggcaagt |
| | | tccagggaagggcctggagtgggtctcaggtattagttggaagaatcacagtctagg |
| | | ctatgcggactctgtgaagggccgattcaccatctccagagacaacgccaagaact |
| | | ccctatatctgcaaatgaacagtct |
| 1219. | VL_nuc | gactcagtctccactctccctggccgtcacccctggagagccggcctccatctcctgc |
| | | aggtctagtcagagcctcctgcatagtaatggatacaagtatttggattggtacctgca |
| | | gaagccagggcagtctccacagctcctgatctatatgggttctaaccgggcctccgg |
| | | ggtccctgacaggttcagtgtcagtgggtcaggcacagattttacactgaaaatcagc |
| | | agagtggaggctgcggatgttgg |
| SEQ ID NO | | 24BU7P1A10 |
| 1220. | CDR-H1 | GFVFDDYS |
| 1221. | CDR-H2 | ISWDGGRT |
| 1222. | CDR-H3 | VKDTGLRSFDS |
| 1223. | CDR-L1 | QSLMHTNGYIY |
| 1224. | CDR-L2 | LGS |
| 1225. | CDR-L3 | MQALQSWT |
| 1226. | VH | ESGGEVVQPGRSLRLSCAASGFVFDDYSMHWVRQVPGKG |
| | | LEWVALISWDGGRTSYGHSVKGRFTISRDNTKDSLFLQMNS |
| | | LRPEDTALYYCVKDTGLRSFDSWGQGILVTVSS |
| 1227. | VL | MXXXTQSPLSLPVTPGEPASISCRSSQSLMHTNGYIYLDWY |
| | | LQKPGQSPQLLIYLGSKRAPGVPDRFSGSGSGTDFTLKISR |
| | | VEAEDVGVYYCMQALQSWTFGQGTKVEIK |
| 1228. | FR-H1 | ESGGEVVQPGRSLRLSCAAS |
| 1229. | FR-H2 | MHWVRQVPGKGLEWVAL |
| 1230. | FR-H3 | SYGHSVKGRFTISRDNTKDSLFLQMNSLRPEDTALYYC |
| 1231. | FR-H4 | WGQGILVTVSS |
| 1232. | FR-L1 | MXXXTQSPLSLPVTPGEPASISCRSS |
| 1233. | FR-L2 | LDWYLQKPGQSPQLLIY |
| 1234. | FR-L3 | KRAPGVPDRFSGSGSGTDFTLKISRVEAEDVGVYYC |
| 1235. | FR-L4 | FGQGTKVEIK |
| 1236. | heavychain | ESGGEVVQPGRSLRLSCAASGFVFDDYSMHWVRQVPGKG |
| | | LEWVALISWDGGRTSYGHSVKGRFTISRDNTKDSLFLQMNS |
| | | LRPEDTALYYCVKDTGLRSFDSWGQGILVTVSSKGPSVFPL |
| | | APSSKSTSGGTAALGXLVKDYFPEPVTVSWNSGALTSGVHT |
| | | FPAVLQSSGLYSLSSVVTVPSSSLGTQTYICNVNHKPSNTKV |
| | | DKXVEPKSCDKTHTCPPCPAPELLGGPSVFLFPPKPKDTLMI |
| | | SRTPEVTCV |
| 1237. | lightchain | MXXXTQSPLSLPVTPGEPASISCRSSQSLMHTNGYIYLDWY |
| | | LQKPGQSPQLLIYLGSKRAPGVPDRFSGSGSGTDFTLKISR |
| | | VEAEDVGVYYCMQALQSWTFGQGTKVEIKAPSVFIFPPSDE |
| | | QLKSGTASVVCLLNNFYPREAKVQWKVDNALQSGNSQESV |
| | | TEQDSKDSTYSLSSTLTLSKADYEKHKVYACEVTHQGLSSP |
| | | VTKSFNRGEC*K |
| 1238. | VH_nuc | tggagtctggcggagaggtcgtacagccggggaggtccctgaggctgtcctgtgca |
| | | gcctctggattcgtctttgatgattattccatgcactgggtccgtcaagtcccggggaag |
| | | ggccttgagtgggtcgctctaattagttgggatggtggtcgcacatcctatggacactct |
| | | gtgaagggccgattcaccatctccagagacaacaccaaggactccctgtttctgcaa |
| | | atgaacagtctgagacccgagg |
| 1239. | VL_nuc | atgttngnnnagactcagtctccactctccctgcccgtcactcctggagagccggcct |
| | | ccatctcctgcaggtctagtcagagcctcatgcatactaatggatacatctatttggatt |
| | | ggtacctgcagaagcctgggcagtctccacagctcctgatctatctgggttctaagcg |
| | | ggcccccggggtccccgacaggttcagtggcagtggatcaggcacagattttacact |
| | | gaaaatcagcagagtggaggct |
| SEQ ID NO | | 24BU7P1B6 |
| 1240. | CDR-H1 | GFTFSHAS |
| 1241. | CDR-H2 | IRSKTDGGTT |
| 1242. | CDR-H3 | NTHFYCNRSMCYGDY |
| 1243. | CDR-L1 | QSVLYSSNNKNY |
| 1244. | CDR-L2 | WAS |
| 1245. | CDR-L3 | QQYYSGRT |
| 1246. | VH | ESGGGLVKPGGSLRLSCAASGFTFSHASMSWVRQAPGKG |
| | | LEWVGRIRSKTDGGTTDYAAPVKGRFTISRDDSKNTLYLQM |
| | | NSLKTEDTAVYYCNTHFYCNRSMCYGDYWGQGTLVTVSS |
| 1247. | VL | DIXXTQSPDSLAVSLGERATINCKSSQSVLYSSNNKNYLAW |
| | | YQQKPGQPPKLLIYWASTRESGVPDRFRGSGSGTDFSLTIS |
| | | SLQAEDVAVYYCQQYYSGRTFGPGTKVDFK |
| 1248. | FR-H1 | ESGGGLVKPGGSLRLSCAAS |
| 1249. | FR-H2 | MSWVRQAPGKGLEWVGR |
| 1250. | FR-H3 | DYAAPVKGRFTISRDDSKNTLYLQMNSLKTEDTAVYYC |
| 1251. | FR-H4 | WGQGTLVTVSS |
| 1252. | FR-L1 | DIXXTQSPDSLAVSLGERATINCKSS |
| 1253. | FR-L2 | LAWYQQKPGQPPKLLIY |
| 1254. | FR-L3 | TRESGVPDRFRGSGSGTDFSLTISSLQAEDVAVYYC |
| 1255. | FR-L4 | FGPGTKVDFK |
| 1256. | heavychain | ESGGGLVKPGGSLRLSCAASGFTFSHASMSWVRQAPGKG |
| | | LEWVGRIRSKTDGGTTDYAAPVKGRFTISRDDSKNTLYLQM |
| | | NSLKTEDTAVYYCNTHFYCNRSMCYGDYWGQGTLVTVSSK |
| | | GPSVFPLAPSSKSTSGGTAALGXLVKDYFPEPVTVSWNSGA |
| | | LTSGVHTFPAVLQSSGLYSLSSVVTVPSSSLGTQTYICNVNH |
| | | KPSNTKVDKXVEPKSCDKTHTCPPCPAPELLGGPSVFLFPP |
| | | KPKDTLMISRT |
| 1257. | lightchain | DIXXTQSPDSLAVSLGERATINCKSSQSVLYSSNNKNYLAW |
| | | YQQKPGQPPKLLIYWASTRESGVPDRFRGSGSGTDFSLTIS |
| | | SLQAEDVAVYYCQQYYSGRTFGPGTKVDFKAPSVFIFPPSD |
| | | EQLKSGTASVVCLLNNFYPREAKVQWKVDNALQSGNSQES |
| | | VTEQDSKDSTYSLSSTLTLSKADYEKHKVYACEVTHQGLSS |
| | | PVTKSFNRGEC*K |
| 1258. | VH_nuc | tngagtctgggggaggcttggtaaagcctggggggtcccttagactctcctgtgcagc |
| | | ctctggattcactttcagtcacgcctcgatgagctgggtccgccaggctccagggaag |
| | | gggctggagtgggttggccgtattagaagcaaaactgatggcgggacaacagact |
| | | acgctgcacccgtgaaaggcagattcaccatctcaagagatgattcaaaaaacac |
| | | actgtatctgcaaatgaacagcctgaaaa |
| 1259. | VL_nuc | gacatcgnnnagacccagtctccagactccctggctgtgtctctgggcgagagggc |
| | | caccatcaactgcaagtccagccagagtgttttatacagctccaataataagaattac |
| | | ttagcttggtaccagcagaaaccagggcagcctcctaagttgctcatttactgggcat |
| | | ctacccgggaatccggggtccctgaccgattcagaggcagcgggtctgggacaga |
| | | tttctctctcaccatcagcagcctgcag |
| SEQ ID NO | | 24BU7P1D1 |
| 1260. | CDR-H1 | GFTFEDYS |
| 1261. | CDR-H2 | ISWDGGRT |
| 1262. | CDR-H3 | VKDTGLRSFDS |
| 1263. | CDR-L1 | QSLVHSNGINY |
| 1264. | CDR-L2 | MGF |
| 1265. | CDR-L3 | MQALQSWT |
| 1266. | VH | VESGGVVVQRGGSLRLSCAGSGFTFEDYSMHWVRQSPGK |
| | | GLEWVSLISWDGGRTSYGDSVKGRFTISRDNSKKSLFLQMT |
| | | NLRPEDTALYYCVKDTGLRSFDSWGQGTLVTVSS |
| 1267. | VL | MXXXTQSPLSLPVTPGEPASISCRSSQSLVHSNGINYLDWYI |
| | | QKPGQSPQLLIYMGFKRAAGVPDRFSGSVSGTDFTLMISRV |
| | | EAEDVGVYYCMQALQSWTFGQGTRVEIK |
| 1268. | FR-H1 | VESGGVVVQRGGSLRLSCAGS |
| 1269. | FR-H2 | MHWVRQSPGKGLEWVSL |
| 1270. | FR-H3 | SYGDSVKGRFTISRDNSKKSLFLQMTNLRPEDTALYYC |
| 1271. | FR-H4 | WGQGTLVTVSS |
| 1272. | FR-L1 | MXXXTQSPLSLPVTPGEPASISCRSS |
| 1273. | FR-L2 | LDWYIQKPGQSPQLLIY |
| 1274. | FR-L3 | KRAAGVPDRFSGSVSGTDFTLMISRVEAEDVGVYYC |
| 1275. | FR-L4 | FGQGTRVEIK |
| 1276. | heavychain | VESGGVVVQRGGSLRLSCAGSGFTFEDYSMHWVRQSPGK |
| | | GLEWVSLISWDGGRTSYGDSVKGRFTISRDNSKKSLFLQMT |
| | | NLRPEDTALYYCVKDTGLRSFDSWGQGTLVTVSSKGPSVF |
| | | PLAPSSKSTSGGTAALGXLVKDYFPEPVTVSWNSGALTSGV |
| | | HTFPAVLQSSGLYSLSSVVTVPSSSLGTQTYICNVNHKPSNT |
| | | KVDKXVEPKSCDKTHTCPPCPAPELLGGPSVFLFPPKPKDT |
| | | LMISRTPEVTC |
| 1277. | lightchain | MXXXTQSPLSLPVTPGEPASISCRSSQSLVHSNGINYLDWYI |
| | | QKPGQSPQLLIYMGFKRAAGVPDRFSGSVSGTDFTLMISRV |
| | | EAEDVGVYYCMQALQSWTFGQGTRVEIKAPSVFIFPPSDEQ |
| | | LKSGTASVVCLLNNFYPREAKVQWKVDNALQSGNSQESVT |
| | | EQDSKDSTYSLSSTLTLSKADYEKHKVYACEVTHQGLSSPV |
| | | TKSFNRGEC*K |
| 1278. | VH_nuc | gtggagtctggcggagtcgtggtacagcggggggggtccctgagactctcctgtgca |
| | | ggctctggattcacctttgaggattattccatgcactgggtccgtcaatctccggggaa |
| | | gggtcttgagtgggtctctcttattagttgggatggtggccggacatcctatggagactc |
| | | tgtgaaggggcggttcaccatctccagagacaacagcaagaagtccctgtttctgca |
| | | aatgaccaatctgagacccgaa |
| 1279. | VL_nuc | atgttngnngngactcagtctcctctctccctgcccgtcacccctggagagccggcct |
| | | ccatctcctgtcggtctagtcagagcctcgtgcatagtaatggaatcaactatttggact |
| | | ggtacatccagaagccagggcagtctccacaactcctgatctatatgggttttaagcg |
| | | ggccgccggggtccctgacaggttcagtggcagtgtctcaggcacagattttacact |
| | | gatgatcagcagagtggaggct |
| SEQ ID NO | | 24BU7P1D4 |
| 1280. | CDR-H1 | GFIFDDYS |
| 1281. | CDR-H2 | ISWDGGRT |
| 1282. | CDR-H3 | VKDTGLRSFDS |
| 1283. | CDR-L1 | QSLVHSNGYTY |
| 1284. | CDR-L2 | MGS |
| 1285. | CDR-L3 | MQALQSWT |
| 1286. | VH | ESGGEVVQPGGSLRLSCVASGFIFDDYSMHWVRQVPGKGL |
| | | EWVSLISWDGGRTSYGDSVKGRFTISRDNNKKTLFLQMNSL |
| | | RPEDTALYYCVKDTGLRSFDSWGQGILVTVSS |
| 1287. | VL | DVXETQSPLSLPVTPGEPASISCRSSQSLVHSNGYTYLDWY |
| | | LQRPGQSPQLLIYMGSKRASGVPDRFSGSFSGTDFTLKISR |
| | | VEAEDVGVYYCMQALQSWTFGLGTKVEIK |
| 1288. | FR-H1 | ESGGEVVQPGGSLRLSCVAS |
| 1289. | FR-H2 | MHWVRQVPGKGLEWVSL |
| 1290. | FR-H3 | SYGDSVKGRFTISRDNNKKTLFLQMNSLRPEDTALYYC |
| 1291. | FR-H4 | WGQGILVTVSS |
| 1292. | FR-L1 | DVXETQSPLSLPVTPGEPASISCRSS |
| 1293. | FR-L2 | LDWYLQRPGQSPQLLIY |
| 1294. | FR-L3 | KRASGVPDRFSGSFSGTDFTLKISRVEAEDVGVYYC |
| 1295. | FR-L4 | FGLGTKVEIK |
| 1296. | heavychain | ESGGEVVQPGGSLRLSCVASGFIFDDYSMHWVRQVPGKGL |
| | | EWVSLISWDGGRTSYGDSVKGRFTISRDNNKKTLFLQMNSL |
| | | RPEDTALYYCVKDTGLRSFDSWGQGILVTVSSKGPSVFPLA |
| | | PSSKSTSGGTAALGXLVKDYFPEPVTVSWNSGALTSGVHTF |
| | | PAVLQSSGLYSLSSVVTVPSSSLGTQTYICNVNHKPSNTKV |
| | | DKXVEPKSCDKTHTCPPCPAPELLGGPSVFLFPPKPKDTLMI |
| | | SRTPEVTCV |
| 1297. | lightchain | DVXETQSPLSLPVTPGEPASISCRSSQSLVHSNGYTYLDWY |
| | | LQRPGQSPQLLIYMGSKRASGVPDRFSGSFSGTDFTLKISR |
| | | VEAEDVGVYYCMQALQSWTFGLGTKVEIKAPSVFIFPPSDE |
| | | QLKSGTASVVCLLNNFYPREAKVQWKVDNALQSGNSQESV |
| | | TEQDSKDSTYSLSSTLTLSKADYEKHKVYACEVTHQGLSSP |
| | | VTKSFNRGEC*K |
| 1298. | VH_nuc | ggagtctggcggagaggtcgtacagcctggggggtccctgagactctcttgtgtagc |
| | | ctctggattcatctttgatgattattccatgcactgggtccgtcaagtcccggggaaggg |
| | | tcttgagtgggtctctctaattagttgggatggtggtcgcacatcctatggagactctgtg |
| | | aagggtcgattcaccatctccagagacaacaacaagaagaccctgtttctgcaaat |
| | | gaacagtctgagacctgagga |
| 1299. | VL_nuc | gatgttgnngagactcagtctccactctccctgcccgtcacccctggagagccggcct |
| | | ccatctcctgcaggtctagtcagagcctcgttcatagtaatggatacacctatttggatt |
| | | ggtacctgcagaggccagggcagtctccgcaactcctgatctatatgggttctaagc |
| | | gggcctccggggtccctgacaggttcagtggcagtttctcaggcacagattttacact |
| | | gaaaatcagcagagtggaggct |
| SEQ ID NO | | 24BU7P1C10 |
| 1300. | CDR-H1 | GFTFDDYS |
| 1301. | CDR-H2 | ISWDGGRT |
| 1302. | CDR-H3 | VKDTGLRSFDS |
| 1303. | CDR-L1 | QSVFDDSSNKNY |
| 1304. | CDR-L2 | WAS |
| 1305. | CDR-L3 | HQYYSTPHS |
| 1306. | VH | ESGGVVVQPGGSLRLSCAASGFTFDDYSMHWVRQVPGKG |
| | | LEWVSLISWDGGRTSYGDSVKGRFTISRDNSKRSLFLQMTN |
| | | LRPEDTAFYYCVKDTGLRSFDSWGQGTLVTVSS |
| 1307. | VL | DXXXTQSPDSVAVSLGQRATINCESSQSVFDDSSNKNYLA |
| | | WYQHKPGQPPKLLIYWASSRESGVPDRFIGSGSGTDFTLTI |
| | | SSLQAADVAVYYCHQYYSTPHSFGQGTKVAIK |
| 1308. | FR-H1 | ESGGVVVQPGGSLRLSCAAS |
| 1309. | FR-H2 | MHWVRQVPGKGLEWVSL |
| 1310. | FR-H3 | SYGDSVKGRFTISRDNSKRSLFLQMTNLRPEDTAFYYC |
| 1311. | FR-H4 | WGQGTLVTVSS |
| 1312. | FR-L1 | DXXXTQSPDSVAVSLGQRATINCESS |
| 1313. | FR-L2 | LAWYQHKPGQPPKLLIY |
| 1314. | FR-L3 | SRESGVPDRFIGSGSGTDFTLTISSLQAADVAVYYC |
| 1315. | FR-L4 | FGQGTKVAIK |
| 1316. | heavychain | ESGGVVVQPGGSLRLSCAASGFTFDDYSMHWVRQVPGKG |
| | | LEWVSLISWDGGRTSYGDSVKGRFTISRDNSKRSLFLQMTN |
| | | LRPEDTAFYYCVKDTGLRSFDSWGQGTLVTVSSKGPSVFPL |
| | | APSSKSTSGGTAALGXLVKDYFPEPVTVSWNSGALTSGVHT |
| | | FPAVLQSSGLYSLSSVVTVPSSSLGTQTYICNVNHKPSNTKV |
| | | DKXVEPKSCDKTHTCPPCPAPELLGGPSVFLFPPKPKDTLMI |
| | | SRTPEVTCV |
| 1317. | lightchain | DXXXTQSPDSVAVSLGQRATINCESSQSVFDDSSNKNYLA |
| | | WYQHKPGQPPKLLIYWASSRESGVPDRFIGSGSGTDFTLTI |
| | | SSLQAADVAVYYCHQYYSTPHSFGQGTKVAIKAPSVFIFPPS |
| | | DEQLKSGTASVVCLLNNFYPREAKVQWKVDNALQSGNSQE |
| | | SVTEQDSKDSTYSLSSTLTLSKADYEKHKVYACEVTHQGLS |
| | | SPVTKSFNRGEC*K |
| 1318. | VH_nuc | tggagtctggcggagtcgtggtacagcctggggggtccctgagactctcctgtgcag |
| | | cctctggattcacctttgatgattattccatgcactgggtccgtcaagttccggggaagg |
| | | gtcttgagtgggtctctcttattagttgggatggtggccggacatcctatggagactcag |
| | | tgaagggtcgattcaccatctccagagacaacagcaagaggtccctgtttctgcaaa |
| | | tgaccaatctgagacctgaag |
| 1319. | VL_nuc | gacatnngnntgacccagtctccagactccgtggctgtgtctctgggccagagggcc |
| | | accatcaactgcgagtccagccagagtgttttcgatgactccagcaataagaactac |
| | | ttagcttggtatcaacacaaaccaggacagcctcctaaactactcatttactgggcatc |
| | | tagccgggaatccggggtccctgaccgattcattggcagcgggtctgggacagactt |
| | | cactctcaccatcagcagcctgcag |
| SEQ ID NO | | 24BU7P1D3 |
| 1320. | CDR-H1 | GFTFDDYS |
| 1321. | CDR-H2 | ISWDGGRT |
| 1322. | CDR-H3 | VKDTGLRSFDY |
| 1323. | CDR-L1 | QGLQHSNGYNY |
| 1324. | CDR-L2 | MGS |
| 1325. | CDR-L3 | MQALQSWT |
| 1326. | VH | ESGGVVVQPGGSLRLSCAASGFTFDDYSMHWVRQLPGKG |
| | | LEWVSLISWDGGRTDYADSVKGRFTISRDNSKSSLLLQMNS |
| | | LRLEDTALYYCVKDTGLRSFDYWGQGTLVTVSS |
| 1327. | VL | DVGETQSPLSLPVTPGEPASMSCRSSQGLQHSNGYNYVD |
| | | WYLQKPGQSPQLLIYMGSKRASGVPDRFSGSGSGTDFTLKI |
| | | SRVEAEDVGVYYCMQALQSWTFGQGTKVEIK |
| 1328. | FR-H1 | ESGGVVVQPGGSLRLSCAAS |
| 1329. | FR-H2 | MHWVRQLPGKGLEWVSL |
| 1330. | FR-H3 | DYADSVKGRFTISRDNSKSSLLLQMNSLRLEDTALYYC |
| 1331. | FR-H4 | WGQGTLVTVSS |
| 1332. | FR-L1 | DVGETQSPLSLPVTPGEPASMSCRSS |
| 1333. | FR-L2 | VDWYLQKPGQSPQLLIY |
| 1334. | FR-L3 | KRASGVPDRFSGSGSGTDFTLKISRVEAEDVGVYYC |
| 1335. | FR-L4 | FGQGTKVEIK |
| 1336. | heavychain | ESGGVVVQPGGSLRLSCAASGFTFDDYSMHWVRQLPGKG |
| | | LEWVSLISWDGGRTDYADSVKGRFTISRDNSKSSLLLQMNS |
| | | LRLEDTALYYCVKDTGLRSFDYWGQGTLVTVSSKGPSVFPL |
| | | APSSKSTSGGTAALGXLVKDYFPEPVTVSWNSGALTSGVHT |
| | | FPAVLQSSGLYSLSSVVTVPSSSLGTQTYICNVNHKPSNTKV |
| | | DKXVEPKSCDKTHTCPPCPAPELLGGPSVFLFPPKPKDTLMI |
| | | SRTPEVTCV |
| 1337. | lightchain | DVGETQSPLSLPVTPGEPASMSCRSSQGLQHSNGYNYVD |
| | | WYLQKPGQSPQLLIYMGSKRASGVPDRFSGSGSGTDFTLKI |
| | | SRVEAEDVGVYYCMQALQSWTFGQGTKVEIKAPSVFIFPPS |
| | | DEQLKSGTASVVCLLNNFYPREAKVQWKVDNALQSGNSQE |
| | | SVTEQDSKDSTYSLSSTLTLSKADYEKHKVYACEVTHQGLS |
| | | SPVTKSFNRGEC*K |
| 1338. | VH_nuc | ggagtctggcggagtcgtggtacagcctgggggatccctgagactctcctgtgcagc |
| | | ctctggattcacttttgatgattactccatgcactgggtccgtcaacttccggggaaagg |
| | | tctggagtgggtctctcttattagttgggatggaggtcgcacagactatgcagactctgt |
| | | gaagggtcgattcaccatctccagagacaatagcaagagctccctgcttctgcaaat |
| | | gaacagtctgagacttgaaga |
| 1339. | VL_nuc | gatgttggngagactcagtctccactctccctgcccgtcacccctggagagccggcct |
| | | ccatgtcctgcaggtctagtcagggcctccagcatagtaatggatacaactatgtgga |
| | | ttggtacctgcagaagccagggcagtctccacagctcctgatctatatgggctctaag |
| | | cgggcctccggggtccctgacaggttcagtggcagtggatcaggcacagattttaca |
| | | ctgaaaatcagcagagtggaggct |
| SEQ ID NO | | 24BU7P1D9 |
| 1340. | CDR-H1 | GFTFNYAV |
| 1341. | CDR-H2 | IDSESDGGTT |
| 1342. | CDR-H3 | NTHFYCTTTSCYGDH |
| 1343. | CDR-L1 | QSVLYSPKNKHY |
| 1344. | CDR-L2 | WAS |
| 1345. | CDR-L3 | QQYYSGRT |
| 1346. | VH | ESGGGLVKPGESLRLSCEGSGFTFNYAVMSWVRQAPGKG |
| | | LEWVGRIDSESDGGTTDYAAPVKGRFTISRDDSRNTLHLQM |
| | | NSLEIGDTAVYYCNTHFYCTTTSCYGDHWGQGTLVTVSS |
| 1347. | VL | TXXVTQSPEFLSLSLGERASINCKASQSVLYSPKNKHYLAW |
| | | YQQKPGQPPKLLMYWASTRESGVPDRFSGSGSGTDFTLTI |
| | | NTFQAEDVAVYYCQQYYSGRTFGPGTKVDIK |
| 1348. | FR-H1 | ESGGGLVKPGESLRLSCEGS |
| 1349. | FR-H2 | MSWVRQAPGKGLEWVGR |
| 1350. | FR-H3 | DYAAPVKGRFTISRDDSRNTLHLQMNSLEIGDTAVYYC |
| 1351. | FR-H4 | WGQGTLVTVSS |
| 1352. | FR-L1 | TXXVTQSPEFLSLSLGERASINCKAS |
| 1353. | FR-L2 | LAWYQQKPGQPPKLLMY |
| 1354. | FR-L3 | TRESGVPDRFSGSGSGTDFTLTINTFQAEDVAVYYC |
| 1355. | FR-L4 | FGPGTKVDIK |
| 1356. | heavychain | ESGGGLVKPGESLRLSCEGSGFTFNYAVMSWVRQAPGKG |
| | | LEWVGRIDSESDGGTTDYAAPVKGRFTISRDDSRNTLHLQM |
| | | NSLEIGDTAVYYCNTHFYCTTTSCYGDHWGQGTLVTVSSK |
| | | GPSVFPLAPSSKSTSGGTAALGXLVKDYFPEPVTVSWNSGA |
| | | LTSGVHTFPAVLQSSGLYSLSSVVTVPSSSLGTQTYICNVNH |
| | | KPSNTKVDKXVEPKSCDKTHTCPPCPAPELLGGPSVFLFPP |
| | | KPKDTLMISRT |
| 1357. | lightchain | TXXVTQSPEFLSLSLGERASINCKASQSVLYSPKNKHYLAW |
| | | YQQKPGQPPKLLMYWASTRESGVPDRFSGSGSGTDFTLTI |
| | | NTFQAEDVAVYYCQQYYSGRTFGPGTKVDIKAPSVFIFPPS |
| | | DEQLKSGTASVVCLLNNFYPREAKVQWKVDNALQSGNSQE |
| | | SVTEQDSKDSTYSLSSTLTLSKADYEKHKVYACEVTHQGLS |
| | | SPVTKSFNRGEC*K |
| 1358. | VH_nuc | gagtctgggggaggcttggtaaagcctggggagtcccttcgactctcctgtgaaggct |
| | | ctggattcactttcaattacgccgtgatgagctgggtccgccaggctccagggaagg |
| | | ggctggagtgggttggccgtattgatagcgaaagtgacggtgggacaacagactac |
| | | gctgcacccgtgaaaggcagattcaccatctcaagagacgattcaagaaacacgc |
| | | tgcatctgcagatgaacagcctggaaatc |
| 1359. | VL_nuc | acatnggnngtgacccagtctccagagttcctgagtctgtctctgggcgagagggcc |
| | | tccatcaactgcaaggccagccagagtgttttatacagccccaaaaataagcactac |
| | | ttggcttggtatcagcagaaacctggacagcctcctaagctgctcatgtattgggcttct |
| | | acccgggaatccggggtccctgaccgattcagtggcagcgggtctggtacagatttc |
| | | actctcaccatcaacaccttccag |
| SEQ ID NO | | 24BU7P1B1 |
| 1360. | CDR-H1 | GYSFTRFD |
| 1361. | CDR-H2 | MNPKSGHS |
| 1362. | CDR-H3 | ARGVDNRX |
| 1363. | CDR-L1 | QSVFDDSSNKNY |
| 1364. | CDR-L2 | WAS |
| 1365. | CDR-L3 | LQYYSTPHS |
| 1366. | VH | SGAEVKKPGASVKVSCKTSGYSFTRFDINWVRQATGQGLE |
| | | WMGWMNPKSGHSGPAQKFQGRITMTVNTSISTAYMELSSL |
| | | RFEDTAVYYCARGVDNRXWGQGTLITVSS |
| 1367. | VL | DIXXTQSPDSVAVSLGQRATINCESSQSVFDDSSNKNYLAW |
| | | YQHKPGQPPKLLIYWASSRESGVPDRFIGSGSGTDFTLTISS |
| | | LQAADVAVYYCLQYYSTPHSFGQGTKVAIN |
| 1368. | FR-H1 | SGAEVKKPGASVKVSCKTS |
| 1369. | FR-H2 | INWVRQATGQGLEWMGW |
| 1370. | FR-H3 | GPAQKFQGRITMTVNTSISTAYMELSSLRFEDTAVYYC |
| 1371. | FR-H4 | WGQGTLITVSS |
| 1372. | FR-L1 | DIXXTQSPDSVAVSLGQRATINCESS |
| 1373. | FR-L2 | LAWYQHKPGQPPKLLIY |
| 1374. | FR-L3 | SRESGVPDRFIGSGSGTDFTLTISSLQAADVAVYYC |
| 1375. | FR-L4 | FGQGTKVAIN |
| 1376. | heavychain | SGAEVKKPGASVKVSCKTSGYSFTRFDINWVRQATGQGLE |
| | | WMGWMNPKSGHSGPAQKFQGRITMTVNTSISTAYMELSSL |
| | | RFEDTAVYYCARGVDNRXWGQGTLITVSSKGPSVFPLAPSS |
| | | KSTSGGTAALGXLVKDYFPEPVTVSWNSGALTSGVHTFPAV |
| | | LQSSGLYSLSSVVTVPSSSLGTQTYICNVNHKPSNTKVDKX |
| | | VEPKSCDKTHTCPPCPAPELLGGPSVFLFPPKPKDTLMISRT |
| | | PEVTCVVVDV |
| 1377. | lightchain | DIXXTQSPDSVAVSLGQRATINCESSQSVFDDSSNKNYLAW |
| | | YQHKPGQPPKLLIYWASSRESGVPDRFIGSGSGTDFTLTISS |
| | | LQAADVAVYYCLQYYSTPHSFGQGTKVAINAPSVFIFPPSDE |
| | | QLKSGTASVVCLLNNFYPREAKVQWKVDNALQSGNSQESV |
| | | TEQDSKDSTYSLSSTLTLSKADYEKHKVYACEVTHQGLSSP |
| | | VTKSFNRGEC*K |
| 1378. | VH_nuc | agtctggggctgaggtgaagaagcctggggcctcagtgaaggtctcctgcaagactt |
| | | ctggatacagcttcacccgttttgatatcaactgggtgcgacaggccactggacaag |
| | | ggcttgagtggatgggatggatgaaccctaagagtggtcactcaggccctgcacag |
| | | aagttccagggcagaatcaccatgaccgttaacacctccataagtacagcctacatg |
| | | gagctgagcagcctgagatttgaggaca |
| 1379. | VL_nuc | gacatcgnnnnnacccagtctccagactccgtggctgtgtctctgggccagagggc |
| | | caccatcaactgcgagtccagccagagtgttttcgatgactccagcaataagaacta |
| | | cttagcttggtatcaacacaaaccaggacagcctcctaaactactcatttactgggcat |
| | | ctagccgggaatccggggtccctgaccgattcattggcagcgggtctgggacagac |
| | | ttcactctcaccatcagcagcctgcag |
| SEQ ID NO | | 24BU7P1C2 |
| 1380. | CDR-H1 | GFTFDDYS |
| 1381. | CDR-H2 | ISWDGART |
| 1382. | CDR-H3 | VKDTGLRSFDS |
| 1383. | CDR-L1 | QSLLHSNGYNY |
| 1384. | CDR-L2 | MGS |
| 1385. | CDR-L3 | MQALQTWT |
| 1386. | VH | VESGGVVVQPGGSLRLSCAASGFTFDDYSMHWVRQVPGK |
| | | GLEWVSLISWDGARTSYGDSVKGRFTISRDNSKRSLFLQMT |
| | | NLRPEDTAFYYCVKDTGLRSFDSWGQGTLVTVSS |
| 1387. | VL | DVXETQSPLSLPVTPGEPASISCRSSQSLLHSNGYNYLDWY |
| | | LQKPGQSPQLLIYMGSKRASGVPDRFSGSVSGTDFTLKISR |
| | | VEAEDVGVYYCMQALQTWTFGQGTKVEIK |
| 1388. | FR-H1 | VESGGVVVQPGGSLRLSCAAS |
| 1389. | FR-H2 | MHWVRQVPGKGLEWVSL |
| 1390. | FR-H3 | SYGDSVKGRFTISRDNSKRSLFLQMTNLRPEDTAFYYC |
| 1391. | FR-H4 | WGQGTLVTVSS |
| 1392. | FR-L1 | DVXETQSPLSLPVTPGEPASISCRSS |
| 1393. | FR-L2 | LDWYLQKPGQSPQLLIY |
| 1394. | FR-L3 | KRASGVPDRFSGSVSGTDFTLKISRVEAEDVGVYYC |
| 1395. | FR-L4 | FGQGTKVEIK |
| 1396. | heavychain | VESGGVVVQPGGSLRLSCAASGFTFDDYSMHWVRQVPGK |
| | | GLEWVSLISWDGARTSYGDSVKGRFTISRDNSKRSLFLQMT |
| | | NLRPEDTAFYYCVKDTGLRSFDSWGQGTLVTVSSKGPSVF |
| | | PLAPSSKSTSGGTAALGXLVKDYFPEPVTVSWNSGALTSGV |
| | | HTFPAVLQSSGLYSLSSVVTVPSSSLGTQTYICNVNHKPSNT |
| | | KVDKXVEPKSCDKTHTCPPCPAPELLGGPSVFLFPPKPKDT |
| | | LMISRTPEVTC |
| 1397. | lightchain | DVXETQSPLSLPVTPGEPASISCRSSQSLLHSNGYNYLDWY |
| | | LQKPGQSPQLLIYMGSKRASGVPDRFSGSVSGTDFTLKISR |
| | | VEAEDVGVYYCMQALQTWTFGQGTKVEIKAPSVFIFPPSDE |
| | | QLKSGTASVVCLLNNFYPREAKVQWKVDNALQSGNSQESV |
| | | TEQDSKDSTYSLSSTLTLSKADYEKHKVYACEVTHQGLSSP |
| | | VTKSFNRGEC*K |
| 1398. | VH_nuc | gtggagtctggcggagtcgtggtacagcctggggggtccctgagactctcctgtgca |
| | | gcctctggattcacctttgatgattattccatgcactgggtccgtcaagttccggggaag |
| | | ggtcttgagtgggtctctcttattagttgggatggtgcccggacatcctatggagactctg |
| | | tgaagggtcgattcaccatctccagagacaacagcaagaggtccctgtttctgcaaa |
| | | tgaccaatctgagacctgaa |
| 1399. | VL_nuc | gatgttnnngagactcagtctccactctccctgcccgtcacccctggagagccggcct |
| | | ccatctcctgcaggtctagtcagagcctcctgcatagtaatggatacaactatttggatt |
| | | ggtacctccagaagccagggcagtctccacagctcctgatctatatgggttctaagcg |
| | | ggcctccggggtccctgacaggttcagtggcagtgtctcaggcacagattttacactg |
| | | aaaatcagcagagtggaggct |
| SEQ ID NO | | 105BU7P1A11 |
| 1400. | CDR-H1 | GFTFGDYT |
| 1401. | CDR-H2 | IKWNGGGI |
| 1402. | CDR-H3 | AKDIGLRSLDS |
| 1403. | CDR-L1 | QSLLHSNGYTY |
| 1404. | CDR-L2 | MGS |
| 1405. | CDR-L3 | MQALQGWT |
| 1406. | VH | CXXVESGGGLVQPGRSLRLSCTASGFTFGDYTMHWVRQA |
| | | PGKGLEWVSNIKWNGGGIGYADSXKGRFTISRDNAGNSLYL |
| | | QMNSLRPEDTAFYYCAKDIGLRSLDSWGQGTLVIVSS |
| 1407. | VL | DVVMTQSPLSLPVTPGEPASISCRSSQSLLHSNGYTYLDWY |
| | | LQKPGQSPQLLIYMGSKRASGVPDRFSGSFSDTDFTLTISR |
| | | VEAEDVGVYYCMQALQGWTFGQGTKVEIK |
| 1408. | FR-H1 | CXXVESGGGLVQPGRSLRLSCTAS |
| 1409. | FR-H2 | MHWVRQAPGKGLEWVSN |
| 1410. | FR-H3 | GYADSXKGRFTISRDNAGNSLYLQMNSLRPEDTAFYYC |
| 1411. | FR-H4 | WGQGTLVIVSS |
| 1412. | FR-L1 | DVVMTQSPLSLPVTPGEPASISCRSS |
| 1413. | FR-L2 | LDWYLQKPGQSPQLLIY |
| 1414. | FR-L3 | KRASGVPDRFSGSFSDTDFTLTISRVEAEDVGVYYC |
| 1415. | FR-L4 | FGQGTKVEIK |
| 1416. | heavychain | CXXVESGGGLVQPGRSLRLSCTASGFTFGDYTMHWVRQA |
| | | PGKGLEWVSNIKWNGGGIGYADSXKGRFTISRDNAGNSLYL |
| | | QMNSLRPEDTAFYYCAKDIGLRSLDSWGQGTLVIVSSKGPS |
| | | VFPLAPSSKSTSGGTAALGXLVKDYFPEPVTVSWNSGALTS |
| | | GVHTFPAVLQSSGLYSLSSVVTVPSSSLGTQTYICNVNHKP |
| | | SNTKVDKXVEPKSCDKTHTCPPCPAPELLGGPSVFLFPPKP |
| | | KDTLMISRTPE |
| 1417. | lightchain | DVVMTQSPLSLPVTPGEPASISCRSSQSLLHSNGYTYLDWY |
| | | LQKPGQSPQLLIYMGSKRASGVPDRFSGSFSDTDFTLTISR |
| | | VEAEDVGVYYCMQALQGWTFGQGTKVEIKAPSVFIFPPSDE |
| | | QLKSGTASVVCLLNNFYPREAKVQWKVDNALQSGNSQESV |
| | | TEQDSKDSTYSLSSTLTLSKADYEKHKVYACEVTHQGLSSP |
| | | VTKSFNRGEC*K |
| 1418. | VH_nuc | gtgcnannnngtggaatctgggggaggcttggtacagcctggcaggtccctgaga |
| | | ctctcctgtacagcctctggtttcacctttggtgattataccatgcattgggtccggcaag |
| | | ctccagggaagggcctggagtgggtctcaaatattaagtggaatggtggtggcatag |
| | | gctatgcggactctgntaagggccgattcaccatctccagagacaacgccgggaac |
| | | tccctctatctacaaatgaacagtct |
| 1419. | VL_nuc | gatgttgtgatgactcagtctccactctccctgcccgtcacccctggagagccggcctc |
| | | catctcctgcaggtctagtcagagcctcctgcatagtaatggatacacctatttggattg |
| | | gtacctgcagaagccagggcagtctccacagctcctgatctatatgggttctaagcg |
| | | ggcctccggggtccctgacaggttcagtggcagtttctcagacacagatttcacactg |
| | | acaatcagcagagtggaggct |
| SEQ ID NO | | 105BU7P1C3 |
| 1420. | CDR-H1 | GFTFNNYA |
| 1421. | CDR-H2 | ISASGGSR |
| 1422. | CDR-H3 | AKDRVEDGNYEKDWHFDL |
| 1423. | CDR-L1 | PIVSGNY |
| 1424. | CDR-L2 | DAS |
| 1425. | CDR-L3 | QQYAKSPVT |
| 1426. | VH | AXXVESGGGLGQPGGSLRLSCPASGFTFNNYAMSWIRQAP |
| | | GKGLEWVSAISASGGSRFYADSVRGRFTISRDNAKNTLYLQ |
| | | LNSLRAEDTAVYFCAKDRVEDGNYEKDWHFDLWGRGTLVT |
| | | VSS |
| 1427. | VL | EIVXTQSPGTLSLSPGERATLSCRASPIVSGNYLAWYQQRP |
| | | GQSPRLLIYDASSRASGVPDRFSGGGSATDFTLTISRLEPED |
| | | FAVYYCQQYAKSPVTFGGGTKVEIK |
| 1428. | FR-H1 | AXXVESGGGLGQPGGSLRLSCPAS |
| 1429. | FR-H2 | MSWIRQAPGKGLEWVSA |
| 1430. | FR-H3 | FYADSVRGRFTISRDNAKNTLYLQLNSLRAEDTAVYFC |
| 1431. | FR-H4 | WGRGTLVTVSS |
| 1432. | FR-L1 | EIVXTQSPGTLSLSPGERATLSCRAS |
| 1433. | FR-L2 | LAWYQQRPGQSPRLLIY |
| 1434. | FR-L3 | SRASGVPDRFSGGGSATDFTLTISRLEPEDFAVYYC |
| 1435. | FR-L4 | FGGGTKVEIK |
| 1436. | heavychain | AXXVESGGGLGQPGGSLRLSCPASGFTFNNYAMSWIRQAP |
| | | GKGLEWVSAISASGGSRFYADSVRGRFTISRDNAKNTLYLQ |
| | | LNSLRAEDTAVYFCAKDRVEDGNYEKDWHFDLWGRGTLVT |
| | | VSSKGPSVFPLAPSSKSTSGGTAALGXLVKDYFPEPVTVSW |
| | | NSGALTSGVHTFPAVLQSSGLYSLSSVVTVPSSSLGTQTYIC |
| | | NVNHKPSNTKVDKXVEPKSCDKTHTCPPCPAPELLGGPSVF |
| | | LFPPKPKDTL |
| 1437. | lightchain | EIVXTQSPGTLSLSPGERATLSCRASPIVSGNYLAWYQQRP |
| | | GQSPRLLIYDASSRASGVPDRFSGGGSATDFTLTISRLEPED |
| | | FAVYYCQQYAKSPVTFGGGTKVEIKAPSVFIFPPSDEQLKSG |
| | | TASVVCLLNNFYPREAKVQWKVDNALQSGNSQESVTEQDS |
| | | KDSTYSLSSTLTLSKADYEKHKVYACEVTHQGLSSPVTKSF |
| | | NRGEC*K |
| 1438. | VH_nuc | gtgccaannnngtggagtcggggggaggcttggggcagccgggggggtccctga |
| | | gactctcctgtccagcctctggattcacctttaacaactatgccatgagttggatccgcc |
| | | aggctccagggaaggggctggagtgggtctcagctattagcgccagtggcggtagc |
| | | agattctacgcagactccgtgaggggccgattcaccatctccagagacaatgccaa |
| | | gaacaccctatatctccaactgaacagcc |
| 1439. | VL_nuc | gaaattgtnnngacgcagtctccaggcaccctgtctttgtctccaggggagagagcc |
| | | accctctcctgcagggccagtccgattgttagcggcaattacttagcctggtatcagca |
| | | gagacctggccagtctccccggctcctcatctatgatgcatccagcagggccagtgg |
| | | cgtcccagacaggttcagtggcggtgggtctgcgacagacttcactctcaccatcag |
| | | cagactggagcctgaagactttgca |
| SEQ ID NO | | 105BU7P1D6 |
| 1440. | CDR-H1 | GYTFSSYD |
| 1441. | CDR-H2 | MNPKNGYS |
| 1442. | CDR-H3 | VRVRTISQGDSWYFDL |
| 1443. | CDR-L1 | QGLTVS |
| 1444. | CDR-L2 | AAS |
| 1445. | CDR-L3 | MHTLQPPYT |
| 1446. | VH | VQSGPEVKKPGASVKVSCKASGYTFSSYDFNWVRQAPGQ |
| | | GLEWMGWMNPKNGYSGFAQNFRGRISMTRNSSITTAYMEL |
| | | TSLTSDDTAVYYCVRVRTISQGDSWYFDLWGRGTLVTVSS |
| 1447. | VL | DMATTQSPSSVSASEGDRAVISCRASQGLTVSLARNHPETG |
| | | EAPNLLISAASSLRGTVAAPXSGSGSGTDFTLKITRVEAEDV |
| | | GVYYCMHTLQPPYTFGRGTKLEIK |
| 1448. | FR-H1 | VQSGPEVKKPGASVKVSCKAS |
| 1449. | FR-H2 | FNWVRQAPGQGLEWMGW |
| 1450. | FR-H3 | GFAQNFRGRISMTRNSSITTAYMELTSLTSDDTAVYYC |
| 1451. | FR-H4 | WGRGTLVTVSS |
| 1452. | FR-L1 | DMATTQSPSSVSASEGDRAVISCRAS |
| 1453. | FR-L2 | LARNHPETGEAPNLLIS |
| 1454. | FR-L3 | SLRGTVAAPXSGSGSGTDFTLKITRVEAEDVGVYYC |
| 1455. | FR-L4 | FGRGTKLEIK |
| 1456. | heavychain | VQSGPEVKKPGASVKVSCKASGYTFSSYDFNWVRQAPGQ |
| | | GLEWMGWMNPKNGYSGFAQNFRGRISMTRNSSITTAYMEL |
| | | TSLTSDDTAVYYCVRVRTISQGDSWYFDLWGRGTLVTVSSK |
| | | GPSVFPLAPSSKSTSGGTAALGXLVKDYFPEPVTVSWNSGA |
| | | LTSGVHTFPAVLQSSGLYSLSSVVTVPSSSLGTQTYICNVNH |
| | | KPSNTKVDKXVEPKSCDKTHTCPPCPAPELLGGPSVFLFPP |
| | | KPKDTLMISRT |
| 1457. | lightchain | DMATTQSPSSVSASEGDRAVISCRASQGLTVSLARNHPETG |
| | | EAPNLLISAASSLRGTVAAPXSGSGSGTDFTLKITRVEAEDV |
| | | GVYYCMHTLQPPYTFGRGTKLEIKAPSVFIFPPSDEQLKSGT |
| | | ASVVCLLNNFYPREAKVQWKVDNALQSGNSQESVTEQDSK |
| | | DSTYSLSSTLTLSKADYEKHKVYACEVTHQGLSSPVTKSFN |
| | | RGEC*K |
| 1458. | VH_nuc | ggtgcagtctgggcctgaggtgaagaagcctggggcctcagtgaaggtctcctgca |
| | | aggcttctggatataccttcagtagttatgacttcaactgggtgcgacaggcccctgga |
| | | caagggcttgagtggatgggatggatgaaccctaaaaatggttactcaggcttcgca |
| | | cagaatttccggggccggatatccatgaccaggaactcctccataaccacagccta |
| | | catggagctgaccagcctgacatctga |
| 1459. | VL_nuc | gacatggcgacgacccagtctccatcttccgtgtctgcatctgaaggggacagagcc |
| | | gtcatctcttgtcgggcgagtcagggtcttaccgtgtcgttagccaggaatcacccgg |
| | | agacaggggaagcccctaacctcctaatctctgctgcatcgagtttgcgaggaactg |
| | | tggctgcaccatncagtggcagtggatcaggcacagattttacactgaaaatcacca |
| | | gagtggaggctgaggatgttggggtt |
| SEQ ID NO | | 105BU7P1D7 |
| 1460. | CDR-H1 | GYTFSNYD |
| 1461. | CDR-H2 | MNPKNGYS |
| 1462. | CDR-H3 | VRVRTISKGDSWYFDL |
| 1463. | CDR-L1 | QSLLHNNGYNY |
| 1464. | CDR-L2 | LVS |
| 1465. | CDR-L3 | MHTLQPPYT |
| 1466. | VH | QSGPEVKKPGASVKVSCKSSGYTFSNYDFNWVRQAPGQG |
| | | LEWMGWMNPKNGYSGFAQNFRGRISMTRNSSITTAYMELT |
| | | SLTSDDTALYYCVRVRTISKGDSWYFDLWGRGTLVTVSS |
| 1467. | VL | RCXXTQSQVSLPVTPGEPASISCRSSQSLLHNNGYNYVDW |
| | | YLQKPGQSPQLLIYLVSNPVSIFRVCIXGSGSGTDFTLKITRV |
| | | EAEDVGVYYCMHTLQPPYTFGQGTKLXIK |
| 1468. | FR-H1 | QSGPEVKKPGASVKVSCKSS |
| 1469. | FR-H2 | FNWVRQAPGQGLEWMGW |
| 1470. | FR-H3 | GFAQNFRGRISMTRNSSITTAYMELTSLTSDDTALYYC |
| 1471. | FR-H4 | WGRGTLVTVSS |
| 1472. | FR-L1 | RCXXTQSQVSLPVTPGEPASISCRSS |
| 1473. | FR-L2 | VDWYLQKPGQSPQLLIY |
| 1474. | FR-L3 | NPVSIFRVCIXGSGSGTDFTLKITRVEAEDVGVYYC |
| 1475. | FR-L4 | FGQGTKLXIK |
| 1476. | heavychain | QSGPEVKKPGASVKVSCKSSGYTFSNYDFNWVRQAPGQG |
| | | LEWMGWMNPKNGYSGFAQNFRGRISMTRNSSITTAYMELT |
| | | SLTSDDTALYYCVRVRTISKGDSWYFDLWGRGTLVTVSSKG |
| | | PSVFPLAPSSKSTSGGTAALGXLVKDYFPEPVTVSWNSGAL |
| | | TSGVHTFPAVLQSSGLYSLSSVVTVPSSSLGTQTYICNVNHK |
| | | PSNTKVDKXVEPKSCDKTHTCPPCPAPELLGGPSVFLFPPK |
| | | PKDTLMISRTP |
| 1477. | lightchain | RCXXTQSQVSLPVTPGEPASISCRSSQSLLHNNGYNYVDW |
| | | YLQKPGQSPQLLIYLVSNPVSIFRVCIXGSGSGTDFTLKITRV |
| | | EAEDVGVYYCMHTLQPPYTFGQGTKLXIKAPSVFIFPPSDE |
| | | QLKSGTASVVCLLNNFYPREAKVQWKVDNALQSGNSQESV |
| | | TEQDSKDSTYSLSSTLTLSKADYEKHKVYACEVTHQGLSSP |
| | | VTKSFNRGEC*K |
| 1478. | VH_nuc | gcagtctgggcctgaggtgaagaagcctggggcctcagtgaaggtctcctgcaagt |
| | | cttctggatataccttcagtaattatgacttcaactgggtgcgacaggcccctggacaa |
| | | gggcttgagtggatgggatggatgaaccctaaaaatggctactcaggcttcgcaca |
| | | gaatttccggggccggatatccatgaccaggaactcctccataaccacagcctacat |
| | | ggagctgaccagcctgacatctgatga |
| 1479. | VL_nuc | cgatgttgnnagactcagtctcaagtctccctgcccgtcacccctggagagccggcc |
| | | tccatctcctgcaggtctagtcagagcctcctgcataacaatggatacaactatgtgg |
| | | attggtacctgcagaagccagggcagtctccacaactcctgatctatttggtttcgaac |
| | | ccagtctccatcttccgtgtctgcatcngtggcagtggatcaggcacagattttacactg |
| | | aagatcaccagagtggaggct |
| SEQ ID NO | | 105BU7P1D8 |
| 1480. | CDR-H1 | GFTFNNYA |
| 1481. | CDR-H2 | ISGRTGSA |
| 1482. | CDR-H3 | ARDGQEGGNYAAEYFQN |
| 1483. | CDR-L1 | QSISKW |
| 1484. | CDR-L2 | KAS |
| 1485. | CDR-L3 | QHFNTELLT |
| 1486. | VH | VESGGGLAQPGGSLTLSCAASGFTFNNYAMSWVRQAPGK |
| | | GLEWVSGISGRTGSAHYADAVRGRFTISRDNAKNTLYLQMS |
| | | SLRADDTATYYCARDGQEGGNYAAEYFQNWGQGTLVTVS |
| | | S |
| 1487. | VL | RHXXTQSPSTLAASVGDRVTITCRASQSISKWLAWYQQKPG |
| | | KAPKLLIYKASRLQSGAPSRFSGSGSGTEFTLTINSLQPDDF |
| | | ATYYCQHFNTELLTFGGGTKVEIK |
| 1488. | FR-H1 | VESGGGLAQPGGSLTLSCAAS |
| 1489. | FR-H2 | MSWVRQAPGKGLEWVSG |
| 1490. | FR-H3 | HYADAVRGRFTISRDNAKNTLYLQMSSLRADDTATYYC |
| 1491. | FR-H4 | WGQGTLVTVSS |
| 1492. | FR-L1 | RHXXTQSPSTLAASVGDRVTITCRAS |
| 1493. | FR-L2 | LAWYQQKPGKAPKLLIY |
| 1494. | FR-L3 | RLQSGAPSRFSGSGSGTEFTLTINSLQPDDFATYYC |
| 1495. | FR-L4 | FGGGTKVEIK |
| 1496. | heavychain | VESGGGLAQPGGSLTLSCAASGFTFNNYAMSWVRQAPGK |
| | | GLEWVSGISGRTGSAHYADAVRGRFTISRDNAKNTLYLQMS |
| | | SLRADDTATYYCARDGQEGGNYAAEYFQNWGQGTLVTVS |
| | | SKGPSVFPLAPSSKSTSGGTAALGXLVKDYFPEPVTVSWNS |
| | | GALTSGVHTFPAVLQSSGLYSLSSVVTVPSSSLGTQTYICNV |
| | | NHKPSNTKVDKXVEPKSCDKTHTCPPCPAPELLGGPSVFLF |
| | | PPKPKDTLMISR |
| 1497. | lightchain | RHXXTQSPSTLAASVGDRVTITCRASQSISKWLAWYQQKPG |
| | | KAPKLLIYKASRLQSGAPSRFSGSGSGTEFTLTINSLQPDDF |
| | | ATYYCQHFNTELLTFGGGTKVEIKAPSVFIFPPSDEQLKSGT |
| | | ASVVCLLNNFYPREAKVQWKVDNALQSGNSQESVTEQDSK |
| | | DSTYSLSSTLTLSKADYEKHKVYACEVTHQGLSSPVTKSFN |
| | | RGEC*K |
| 1498. | VH_nuc | gtngagtcggggggaggcctcgcacagcctgggggatccctgacactctcctgtgc |
| | | agcgtctgggttcacattcaacaattatgccatgagctgggtccgccaggctccagg |
| | | gaaggggctggagtgggtctcaggaataagtgggagaactggtagcgcacactac |
| | | gcagacgccgtgaggggccggttcaccatctccagagacaatgccaagaacaca |
| | | ctgtatctccaaatgagcagcctgagagccgat |
| 1499 | VL_nuc | cgacatcnnnagacccagtctccttccaccctggctgcatctgtaggagacagagtc |
| | | accatcacttgccgggccagtcagagtattagtaagtggttggcctggtatcagcaga |
| | | aaccagggaaagcccctaagctgctgatctataaggcatctcgtttacaaagtgggg |
| | | ccccatcaaggttcagcggcagtggatctgggacagagttcactctcaccataaaca |
| | | gcctgcagcctgatgattttgcaact |
| SEQ ID NO | | 105BU7P1D12 |
| 1500. | CDR-H1 | GFTFRSYA |
| 1501. | CDR-H2 | ISGSGGST |
| 1502. | CDR-H3 | AKDGQTGGNYAAEYFQH |
| 1503. | CDR-L1 | QSVSKW |
| 1504. | CDR-L2 | KAS |
| 1505. | CDR-L3 | QHFNTEQLT |
| 1506. | VH | ESGGGLVQPGGSLRLSCAASGFTFRSYAMSWVRQAPGKG |
| | | LEWVSGISGSGGSTHYADSVEGRFAVSRDNSKNTVYLEMN |
| | | SLRAEDTAVYYCAKDGQTGGNYAAEYFQHWGQGSLVTVS |
| | | S |
| 1507. | VL | RHRXTQSPSTLSASVGDRVTITCRASQSVSKWLAWYQQKA |
| | | GKAPRLLIYKASTLDSGVPSRFSGSGSGTEFTLTISSLQPDD |
| | | FATYYCQHENTEQLTFGGGTKVEIK |
| 1508. | FR-H1 | ESGGGLVQPGGSLRLSCAAS |
| 1509. | FR-H2 | MSWVRQAPGKGLEWVSG |
| 1510. | FR-H3 | HYADSVEGRFAVSRDNSKNTVYLEMNSLRAEDTAVYYC |
| 1511. | FR-H4 | WGQGSLVTVSS |
| 1512. | FR-L1 | RHRXTQSPSTLSASVGDRVTITCRAS |
| 1513. | FR-L2 | LAWYQQKAGKAPRLLIY |
| 1514. | FR-L3 | TLDSGVPSRFSGSGSGTEFTLTISSLQPDDFATYYC |
| 1515. | FR-L4 | FGGGTKVEIK |
| 1516. | heavychain | ESGGGLVQPGGSLRLSCAASGFTFRSYAMSWVRQAPGKG |
| | | LEWVSGISGSGGSTHYADSVEGRFAVSRDNSKNTVYLEMN |
| | | SLRAEDTAVYYCAKDGQTGGNYAAEYFQHWGQGSLVTVS |
| | | SKGPSVFPLAPSSKSTSGGTAALGXLVKDYFPEPVTVSWNS |
| | | GALTSGVHTFPAVLQSSGLYSLSSVVTVPSSSLGTQTYICNV |
| | | NHKPSNTKVDKXVEPKSCDKTHTCPPCPAPELLGGPSVFLF |
| | | PPKPKDTLMISRT |
| 1517. | lightchain | RHRXTQSPSTLSASVGDRVTITCRASQSVSKWLAWYQQKA |
| | | GKAPRLLIYKASTLDSGVPSRFSGSGSGTEFTLTISSLQPDD |
| | | FATYYCQHFNTEQLTFGGGTKVEIKAPSVFIFPPSDEQLKSG |
| | | TASVVCLLNNFYPREAKVQWKVDNALQSGNSQESVTEQDS |
| | | KDSTYSLSSTLTLSKADYEKHKVYACEVTHQGLSSPVTKSF |
| | | NRGEC*K |
| 1518. | VH_nuc | gagtctgggggaggcttggtgcagcctggggggtccctgagactctcgtgtgcagcc |
| | | tctggattcacctttagaagttatgccatgagttgggtccgacaggctccagggaagg |
| | | gactggagtgggtctctggtattagtggtagtggcggcagcacacactatgcagactc |
| | | cgtggagggccggttcgccgtctccagagacaattccaagaacacggtgtatctgg |
| | | aaatgaacagcctgagagccgaggac |
| 1519. | VL_nuc | cgacatcgnnngacccagtctccttccaccctgtctgcatctgtgggagacagagtc |
| | | accatcacttgccgggccagtcagagtgttagtaagtggttggcctggtatcagcaga |
| | | aagcagggaaagcccctaggctcctgatctacaaggcgtccactttagatagtggg |
| | | gtcccatcaaggttcagcggcagtggatctgggacagaattcactcttaccatcagc |
| | | agcctgcagcctgatgattttgcaact |
| SEQ ID NO | | 111BU7P1A12 |
| 1520. | CDR-H1 | GFTFXSXA |
| 1521. | CDR-H2 | IXXXGGXT |
| 1522. | CDR-H3 | XXXXXXXGXXXXXTX |
| 1523. | CDR-L1 | QPISSTY |
| 1524. | CDR-L2 | ATS |
| 1525. | CDR-L3 | QHYSNSPPYT |
| 1526. | VH | GXLRXSCAASGFTFXSXAMXWVRQXPGKGLEWVXXIXXXG |
| | | GXTXYXXXVKGRFXISRDXSKXTLYLQMNSLXXEDTAXYXC |
| | | XXXXXXXGXXXXXTXWGQGTXVTVSS |
| 1527. | VL | EIXXTQSPGTLSLSLGEGATLSCRASQPISSTYLTWYQQRP |
| | | GQAPRLLIYATSTRATDIPDRFSGSGSGTDFTLTISRLETEDF |
| | | AVYYCQHYSNSPPYTFGQGTKLEIK |
| 1528. | FR-H1 | GXLRXSCAAS |
| 1529. | FR-H2 | MXWVRQXPGKGLEWVXX |
| 1530. | FR-H3 | XYXXXVKGRFXISRDXSKXTLYLQMNSLXXEDTAXYXC |
| 1531. | FR-H4 | WGQGTXVTVSS |
| 1532. | FR-L1 | EIXXTQSPGTLSLSLGEGATLSCRAS |
| 1533. | FR-L2 | LTWYQQRPGQAPRLLIY |
| 1534. | FR-L3 | TRATDIPDRFSGSGSGTDFTLTISRLETEDFAVYYC |
| 1535. | FR-L4 | FGQGTKLEIK |
| 1536. | heavychain | GXLRXSCAASGFTFXSXAMXWVRQXPGKGLEWVXXIXXXG |
| | | GXTXYXXXVKGRFXISRDXSKXTLYLQMNSLXXEDTAXYXC |
| | | XXXXXXXGXXXXXTXWGQGTXVTVSSKGPSVFPLAPSSKS |
| | | TSGGTAALGXLVKDYFPEPVTVSWNSGALTSGVHTFPAVLQ |
| | | SSGLYSLSSVVTVPSSSLGTQTYICNVNHKPSNTKVDKXVE |
| | | PKSCDKTHTCPPCPAPELLGGPSVFLFPPKPKDTLMISRTPE |
| | | VTCVVVDVSH |
| 1537. | lightchain | EIXXTQSPGTLSLSLGEGATLSCRASQPISSTYLTWYQQRP |
| | | GQAPRLLIYATSTRATDIPDRFSGSGSGTDFTLTISRLETEDF |
| | | AVYYCQHYSNSPPYTFGQGTKLEIKAPSVFIFPPSDEQLKSG |
| | | TASVVCLLNNFYPREAKVQWKVDNALQSGNSQESVTEQDS |
| | | KDSTYSLSSTLTLSKADYEKHKVYACEVTHQGLSSPVTKSF |
| | | NRGEC*K |
| 1538. | VH_nuc | ggggncctgagantctcctgtgcagcctctggattcacctttnncagywakgccatg |
| | | asctgggtccgccagrctccagggaagggrctggagtgggtyksmsstattarwrg |
| | | nrrtggtggkasmacakactacrcwgmmyccgtgaarggcmgrttcaycatytc |
| | | magagayrattcmaarracacgytgtatctrcaratgaayagyctgararccgagg |
| | | acacrgccstmtattwctgtrcsanaakaysa |
| 1539. | VL_nuc | gaaattgnnntgacgcagtctccaggcaccctgtctttgtctctaggtgaaggagcca |
| | | ccctctcctgcagggccagtcagcctattagtagcacctacttaacctggtaccagca |
| | | gagacctggccaggctccccggctcctcatctacgctacgtccaccagggccactg |
| | | acatcccagacaggttcagtggcagtggctctgggacagacttcactctcaccatca |
| | | gtagactggagactgaagattttgca |
| SEQ ID NO | | 111BU7P1D2 |
| 1540. | CDR-H1 | GFPFDSHA |
| 1541. | CDR-H2 | ISNNGASA |
| 1542. | CDR-H3 | ARTQYYDSRGFYFSLDA |
| 1543. | CDR-L1 | QPISSTY |
| 1544. | CDR-L2 | ATS |
| 1545. | CDR-L3 | QHYSNSPPYT |
| 1546. | VH | ESGGGVVQPGRSVRLSCVGSGFPFDSHAIHWVRQAPGWG |
| | | LEWVAVISNNGASAHYTDSVKGRFTVSRDNSKHTVYLLLNS |
| | | LTKEDTAVYYCARTQYYDSRGFYFSLDAWGQGTLVTVSS |
| 1547. | VL | EIXXTQSPGTLSLSLGEGATLSCRASQPISSTYLTWYQQRP |
| | | GQAPRLLIYATSTRATDIPDRFSGSGSGTDFTLTISRLETEDF |
| | | AVYYCQHYSNSPPYTFGQGTKLEIK |
| 1548. | FR-H1 | ESGGGVVQPGRSVRLSCVGS |
| 1549. | FR-H2 | IHWVRQAPGWGLEWVAV |
| 1550. | FR-H3 | HYTDSVKGRFTVSRDNSKHTVYLLLNSLTKEDTAVYYC |
| 1551. | FR-H4 | WGQGTLVTVSS |
| 1552. | FR-L1 | EIXXTQSPGTLSLSLGEGATLSCRAS |
| 1553. | FR-L2 | LTWYQQRPGQAPRLLIY |
| 1554. | FR-L3 | TRATDIPDRFSGSGSGTDFTLTISRLETEDFAVYYC |
| 1555. | FR-L4 | FGQGTKLEIK |
| 1556. | heavychain | ESGGGVVQPGRSVRLSCVGSGFPFDSHAIHWVRQAPGWG |
| | | LEWVAVISNNGASAHYTDSVKGRFTVSRDNSKHTVYLLLNS |
| | | LTKEDTAVYYCARTQYYDSRGFYFSLDAWGQGTLVTVSSK |
| | | GPSVFPLAPSSKSTSGGTAALGXLVKDYFPEPVTVSWNSGA |
| | | LTSGVHTFPAVLQSSGLYSLSSVVTVPSSSLGTQTYICNVNH |
| | | KPSNTKVDKXVEPKSCDKTHTCPPCPAPELLGGPSVFLFPP |
| | | KPKDTLMISRT |
| 1557. | lightchain | EIXXTQSPGTLSLSLGEGATLSCRASQPISSTYLTWYQQRP |
| | | GQAPRLLIYATSTRATDIPDRFSGSGSGTDFTLTISRLETEDF |
| | | AVYYCQHYSNSPPYTFGQGTKLEIKAPSVFIFPPSDEQLKSG |
| | | TASVVCLLNNFYPREAKVQWKVDNALQSGNSQESVTEQDS |
| | | KDSTYSLSSTLTLSKADYEKHKVYACEVTHQGLSSPVTKSF |
| | | NRGEC*K |
| 1558. | VH_nuc | gagtctgggggaggcgttgtccagcctgggaggtccgtgagactctcctgtgtaggct |
| | | ctggattcccattcgatagtcatgccatacactgggtccgccaggctccaggctgggg |
| | | cctggagtgggtggcagttatctcaaacaatggcgccagtgcacattacacagactc |
| | | cgtgaagggccgattcaccgtctccagagacaattccaagcacaccgtctatctactt |
| | | ctgaacagtctgacaaaagaagac |
| 1559. | VL_nuc | gaaattgnnntgacgcagtctccaggcaccctgtctttgtctctaggtgaaggagcca |
| | | ccctctcctgcagggccagtcagcctattagtagcacctacttaacctggtaccagca |
| | | gagacctggccaggctccccggctcctcatctacgctacgtccaccagggccactg |
| | | acatcccagacaggttcagtggcagtggctctgggacagacttcactctcaccatca |
| | | gtagactggagactgaagattttgca |
| SEQ ID NO | | 111BU7P1D5 |
| 1560. | CDR-H1 | GFTFSTFA |
| 1561. | CDR-H2 | ISDNGNRK |
| 1562. | CDR-H3 | AKTRDYDSRGYYFGLDH |
| 1563. | CDR-L1 | QSVISNY |
| 1564. | CDR-L2 | AAS |
| 1565. | CDR-L3 | QHYGNSPPYT |
| 1566. | VH | CXLVESGGGVVQPGRSLRLSCAASGFTFSTFALHWVRQAP |
| | | GKGLEWMAVISDNGNRKDYADSVKGRFTISRDNSENTLYLE |
| | | MNSLRPEDTXVYYCAKTRDYDSRGYYFGLDHWGQGTLVTV |
| | | SS |
| 1567. | VL | EIGXTQSPGTLSLSPGERATLSCRASQSVISNYLAWYQHKP |
| | | GQAPRLLIYAASSRATDIPDRFSGSGSGTDFILTISRLEPEDF |
| | | AVYYCQHYGNSPPYTFGQGTKVEIK |
| 1568. | FR-H1 | CXLVESGGGVVQPGRSLRLSCAAS |
| 1569. | FR-H2 | LHWVRQAPGKGLEWMAV |
| 1570. | FR-H3 | DYADSVKGRFTISRDNSENTLYLEMNSLRPEDTXVYYC |
| 1571. | FR-H4 | WGQGTLVTVSS |
| 1572. | FR-L1 | EIGXTQSPGTLSLSPGERATLSCRAS |
| 1573. | FR-L2 | LAWYQHKPGQAPRLLIY |
| 1574. | FR-L3 | SRATDIPDRFSGSGSGTDFILTISRLEPEDFAVYYC |
| 1575. | FR-L4 | FGQGTKVEIK |
| 1576. | heavychain | CXLVESGGGVVQPGRSLRLSCAASGFTFSTFALHWVRQAP |
| | | GKGLEWMAVISDNGNRKDYADSVKGRFTISRDNSENTLYLE |
| | | MNSLRPEDTXVYYCAKTRDYDSRGYYFGLDHWGQGTLVTV |
| | | SSKGPSVFPLAPSSKSTSGGTAALGXLVKDYFPEPVTVSWN |
| | | SGALTSGVHTFPAVLQSSGLYSLSSVVTVPSSSLGTQTYICN |
| | | VNHKPSNTKVDKXVEPKSCDKTHTCPPCPAPELLGGPSVFL |
| | | FPPKPKDTLM |
| 1577. | lightchain | EIGXTQSPGTLSLSPGERATLSCRASQSVISNYLAWYQHKP |
| | | GQAPRLLIYAASSRATDIPDRFSGSGSGTDFILTISRLEPEDF |
| | | AVYYCQHYGNSPPYTFGQGTKVEIKAPSVFIFPPSDEQLKS |
| | | GTASVVCLLNNFYPREAKVQWKVDNALQSGNSQESVTEQD |
| | | SKDSTYSLSSTLTLSKADYEKHKVYACEVTHQGLSSPVTKS |
| | | FNRGEC*K |
| 1578. | VH_nuc | ggtgccnnctggtggagtctgggggaggcgtggtccagcctgggaggtccctgaga |
| | | ctctcctgtgcagcctctggattcacatttagtacctttgctctacattgggtccgccagg |
| | | ctccaggcaaggggctggagtggatggccgttatatcagataatgggaatagaaaa |
| | | gactacgcagactccgtgaagggccgattcaccatctcccgagacaactccgaga |
| | | acacactgtatctggaaatgaacagcc |
| 1579. | VL_nuc | gaaataggnnnnacgcagtctccaggcaccctgtctttgtctccaggggaaagagc |
| | | caccctctcctgcagggccagtcagagtgttatcagcaactacttagcctggtatcag |
| | | cacaaacctggccaggctcccaggctcctcatctatgctgcctccagcagggccact |
| | | gacatcccagacaggttcagtggcagtgggtctgggacagacttcattctcaccatc |
| | | agcagactggagcctgaagattttgcg |
| SEQ ID NO | | 22BU7P1C8 |
| 1580. | CDR-H1 | GFTFSYYA |
| 1581. | CDR-H2 | ISNDESHR |
| 1582. | CDR-H3 | AKTLDYSNYGYYFGLDV |
| 1583. | CDR-L1 | QSLSTNF |
| 1584. | CDR-L2 | AAS |
| 1585. | CDR-L3 | QRYGDSPPYT |
| 1586. | VH | VESGGGVVHPGKSLRLSCAASGFTFSYYAMHWVRQAPGK |
| | | GLEWVAIISNDESHRTYADSVRGRFTISRDNSNNILFLQMNN |
| | | VRVEDTAVYYCAKTLDYSNYGYYFGLDVWGQGTTVTVSS |
| 1587. | VL | ATLSCRSSQSLSTNFLAWYQQKPGQTPRLLIYAASNRATGIP |
| | | DRFSGSGSGTDFTLTISRLEPEDFAVYYCQRYGDSPPYTXG |
| 1588. | FR-H1 | VESGGGVVHPGKSLRLSCAAS |
| 1589. | FR-H2 | MHWVRQAPGKGLEWVAI |
| 1590. | FR-H3 | TYADSVRGRFTISRDNSNNILFLQMNNVRVEDTAVYYC |
| 1591. | FR-H4 | WGQGTTVTVSS |
| 1592. | FR-L1 | ATLSCRSS |
| 1593. | FR-L2 | LAWYQQKPGQTPRLLIY |
| 1594. | FR-L3 | NRATGIPDRFSGSGSGTDFTLTISRLEPEDFAVYYC |
| 1595. | FR-L4 | XG |
| 1596. | heavychain | VESGGGVVHPGKSLRLSCAASGFTFSYYAMHWVRQAPGK |
| | | GLEWVAIISNDESHRTYADSVRGRFTISRDNSNNILFLQMNN |
| | | VRVEDTAVYYCAKTLDYSNYGYYFGLDVWGQGTTVTVSSK |
| | | GPSVFPLAPSSKSTSGGTAALGXLVKDYFPEPVTVSWNSGA |
| | | LTSGVHTFPAVLQSSGLYSLSSVVTVPSSSLGTQTYICNVNH |
| | | KPSNTKVDKXVEPKSCDKTHTCPPCPAPELLGGPSVFLFPP |
| | | KPKDTLMISR |
| 1597. | lightchain | ATLSCRSSQSLSTNFLAWYQQKPGQTPRLLIYAASNRATGIP |
| | | DRFSGSGSGTDFTLTISRLEPEDFAVYYCQRYGDSPPYTXG |
| | | APSVFIFPPSDEQLKSGTASVVCLLNNFYPREAKVQWKVDN |
| | | ALQSGNSQESVTEQDSKDSTYSLSSTLTLSKADYEKHKVYA |
| | | CEVTHQGLSSPVTKSFNRGEC*K |
| 1598. | VH_nuc | gtngagtctgggggcggcgttgtccaccctgggaagtccctgagactctcctgtgca |
| | | gcctctggattcacattctcttactatgcaatgcattgggtccgccaggctccaggcaa |
| | | gggactggagtgggtggcaattatatcaaatgatgaaagtcatagaacctacgcag |
| | | actccgtgaggggccggttcaccatttccagagacaattccaacaacatcttatttctg |
| | | caaatgaacaacgtaagagtcgag |
| 1599. | VL_nuc | gccaccctctcctgcaggtccagtcagagtctcagcaccaatttcttagcctggtacca |
| | | gcagaaacctggccagactcccaggctcctcatctacgctgcatccaacagggcca |
| | | ctggcatcccagacaggttcagtggcagtgggtctgggacagacttcactctcaccat |
| | | cagccggctggagcctgaagattttgcagtatattactgtcagcgctatggtgattcac |
| | | ctccgtacacttncggcc |
| SEQ ID NO | | 22BU7P1D12 |
| 1600. | CDR-H1 | GFTFNFFA |
| 1601. | CDR-H2 | ISDNGGHK |
| 1602. | CDR-H3 | AKTLDYSNYGYYFGLDA |
| 1603. | CDR-L1 | QSVTSNY |
| 1604. | CDR-L2 | GAS |
| 1605. | CDR-L3 | QRYGNSPPYT |
| 1606. | VH | VXXVESGGGVAQPGRSLTLSCATSGFTFNFFAMHWVRQAP |
| | | GKGLEWVAVISDNGGHKSHAESLQGRFTISRDNSRSTLFLE |
| | | MNSLRAEDTAVYYCAKTLDYSNYGYYFGLDAWGPGTTVVV |
| | | SS |
| 1607. | VL | ATLSCRASQSVTSNYLAWYQQKPGQAPRLLIYGASNRATGI |
| | | PDRFSGSGSGTDFTLTISGLEPEDFAVYYCQRYGNSPPYTF |
| | | GPXT |
| 1608. | FR-H1 | VXXVESGGGVAQPGRSLTLSCATS |
| 1609. | FR-H2 | MHWVRQAPGKGLEWVAV |
| 1610. | FR-H3 | SHAESLQGRFTISRDNSRSTLFLEMNSLRAEDTAVYYC |
| 1611. | FR-H4 | WGPGTTVVVSS |
| 1612. | FR-L1 | ATLSCRAS |
| 1613. | FR-L2 | LAWYQQKPGQAPRLLIY |
| 1614. | FR-L3 | NRATGIPDRFSGSGSGTDFTLTISGLEPEDFAVYYC |
| 1615. | FR-L4 | FGPXT |
| 1616. | heavychain | VXXVESGGGVAQPGRSLTLSCATSGFTFNFFAMHWVRQAP |
| | | GKGLEWVAVISDNGGHKSHAESLQGRFTISRDNSRSTLFLE |
| | | MNSLRAEDTAVYYCAKTLDYSNYGYYFGLDAWGPGTTVVV |
| | | SSKGPSVFPLAPSSKSTSGGTAALGXLVKDYFPEPVTVSWN |
| | | SGALTSGVHTFPAVLQSSGLYSLSSVVTVPSSSLGTQTYICN |
| | | VNHKPSNTKVDKXVEPKSCDKTHTCPPCPAPELLGGPSVFL |
| | | FPPKPKDTLM |
| 1617. | lightchain | ATLSCRASQSVTSNYLAWYQQKPGQAPRLLIYGASNRATGI |
| | | PDRFSGSGSGTDFTLTISGLEPEDFAVYYCQRYGNSPPYTF |
| | | GPXTAPSVFIFPPSDEQLKSGTASVVCLLNNFYPREAKVQW |
| | | KVDNALQSGNSQESVTEQDSKDSTYSLSSTLTLSKADYEKH |
| | | KVYACEVTHQGLSSPVTKSFNRGEC*K |
| 1618. | VH_nuc | gtgcnannggtggagtctgggggaggcgtggcccagcctgggaggtcactgacgc |
| | | tctcctgtgcgacctctggattcaccttcaatttctttgcaatgcactgggtccgccaggc |
| | | tccaggcaaggggctggagtgggtggcagttatctcagataatggcggtcacaaat |
| | | cccatgcagagtccctacagggccgattcaccatttccagagacaattccaggagc |
| | | acgttgtttctggagatgaacagtctc |
| 1619. | VL_nuc | gccaccctctcctgcagggccagtcagagtgttaccagcaactacttagcctggtac |
| | | cagcagaaacctggccaggctcccaggctcctcatctatggtgcatccaacagggc |
| | | cactggcatcccagacaggttcagtggcagtgggtctgggacagacttcactctcac |
| | | catcagcggactggaacctgaagattttgcagtgtattactgtcagcgatatggtaact |
| | | cacctccgtacacnttcggccctgng |
| SEQ ID NO | | 29BU7P1A2 |
| 1620. | CDR-H1 | GFTLSTYG |
| 1621. | CDR-H2 | SPNRGSST |
| 1622. | CDR-H3 | ARQTKYDFSRGYYKPYSWFDP |
| 1623. | CDR-L1 | QSISTY |
| 1624. | CDR-L2 | AAS |
| 1625. | CDR-L3 | QQNYNMWT |
| 1626. | VH | QVQLVESGGGSVQPGGSLRLSCVGSGFTLSTYGMTWVRQ |
| | | APRKGLEWVSLSPNRGSSTYYADSVKGRFTISRDNSKNTLY |
| | | LQMNSLRVEDTAVYYCARQTKYDFSRGYYKPYSWFDPWG |
| | | QGTLVTVSS |
| 1627. | VL | ASVGDTVTISCRASQSISTYLNWYQQKPGKVPKLLIYAASSL |
| | | ESGVPSRFSGSGSGTDFTLTISSLQSEDFAIYYCQQNYNMW |
| | | TFGQGTKVX |
| 1628. | FR-H1 | QVQLVESGGGSVQPGGSLRLSCVGS |
| 1629. | FR-H2 | MTWVRQAPRKGLEWVSL |
| 1630. | FR-H3 | YYADSVKGRFTISRDNSKNTLYLQMNSLRVEDTAVYYC |
| 1631. | FR-H4 | WGQGTLVTVSS |
| 1632. | FR-L1 | ASVGDTVTISCRAS |
| 1633. | FR-L2 | LNWYQQKPGKVPKLLIY |
| 1634. | FR-L3 | SLESGVPSRFSGSGSGTDFTLTISSLQSEDFAIYYC |
| 1635. | FR-L4 | FGQGTKVX |
| 1636. | heavychain | QVQLVESGGGSVQPGGSLRLSCVGSGFTLSTYGMTWVRQ |
| | | APRKGLEWVSLSPNRGSSTYYADSVKGRFTISRDNSKNTLY |
| | | LQMNSLRVEDTAVYYCARQTKYDFSRGYYKPYSWFDPWG |
| | | QGTLVTVSSKGPSVFPLAPSSKSTSGGTAALGXLVKDYFPE |
| | | PVTVSWNSGALTSGVHTFPAVLQSSGLYSLSSVVTVPSSSL |
| | | GTQTYICNVNHKPSNTKVDKXVEPKSCDKTHTCPPCPAPEL |
| | | LGGPSVFLFPPKP |
| 1637. | lightchain | ASVGDTVTISCRASQSISTYLNWYQQKPGKVPKLLIYAASSL |
| | | ESGVPSRFSGSGSGTDFTLTISSLQSEDFAIYYCQQNYNMW |
| | | TFGQGTKVXAPSVFIFPPSDEQLKSGTASVVCLLNNFYPRE |
| | | AKVQWKVDNALQSGNSQESVTEQDSKDSTYSLSSTLTLSK |
| | | ADYEKHKVYACEVTHQGLSSPVTKSFNRGEC*K |
| 1638. | VH_nuc | caggtgcagctggtggagtctgggggaggctcagtccagcctggggggtccctgag |
| | | actctcctgtgtaggctcgggattcacgcttagcacctatggcatgacgtgggtccgcc |
| | | aggctccacggaaggggctggagtgggtctcacttagtcccaatcgtggaagttcca |
| | | catactacgcggactccgtgaagggccggttcaccatctccagagacaattccaag |
| | | aacacactgtatctgcaaatgaatagc |
| 1639. | VL_nuc | tgcatctgtaggagacacagtcaccatctcttgccgggcaagtcagagcattagcac |
| | | ctatttaaattggtatcaacagaaaccagggaaagtccctaaactcctaatctatgctg |
| | | catccagtttggaaagtggggtcccatcaaggttcagtggcagtggatctgggacag |
| | | atttcactctcaccatcagcagtctgcagtctgaagattttgcaatttactactgtcaaca |
| | | gaattacaatatgtggacgtt |
| SEQ ID NO | | 29BU7P1C11 |
| 1640. | CDR-H1 | GDSISSYY |
| 1641. | CDR-H2 | IFTSGST |
| 1642. | CDR-H3 | ARDRRGLTPSGTWRRWFDP |
| 1643. | CDR-L1 | QNIGSH |
| 1644. | CDR-L2 | STS |
| 1645. | CDR-L3 | QQSNSNTPT |
| 1646. | VH | QESGPGLVKPSETLSLTCSVSGDSISSYYWSWIRQPVGKRP |
| | | EWIGRIFTSGSTNYNPSLTSRVTMSVDTPKNQFSLHLTSVTA |
| | | ADTAVYYCARDRRGLTPSGTWRRWFDPWGQGILVTISS |
| 1647. | VL | LSASVGDXITITCRASQNIGSHLNWYQQKTGTAPKLLIYSTS |
| | | NLQDGVPSRFSGSGSGTDFTLTISSLLPEDFTIYYCQQSNSN |
| | | TPTFGGXTKVE |
| 1648. | FR-H1 | QESGPGLVKPSETLSLTCSVS |
| 1649. | FR-H2 | WSWIRQPVGKRPEWIGR |
| 1650. | FR-H3 | NYNPSLTSRVTMSVDTPKNQFSLHLTSVTAADTAVYYC |
| 1651. | FR-H4 | WGQGILVTISS |
| 1652. | FR-L1 | LSASVGDXITITCRAS |
| 1653. | FR-L2 | LNWYQQKTGTAPKLLIY |
| 1654. | FR-L3 | NLQDGVPSRFSGSGSGTDFTLTISSLLPEDFTIYYC |
| 1655. | FR-L4 | FGGXTKVE |
| 1656. | heavychain | QESGPGLVKPSETLSLTCSVSGDSISSYYWSWIRQPVGKRP |
| | | EWIGRIFTSGSTNYNPSLTSRVTMSVDTPKNQFSLHLTSVTA |
| | | ADTAVYYCARDRRGLTPSGTWRRWFDPWGQGILVTISSKG |
| | | PSVFPLAPSSKSTSGGTAALGXLVKDYFPEPVTVSWNSGAL |
| | | TSGVHTFPAVLQSSGLYSLSSVVTVPSSSLGTQTYICNVNHK |
| | | PSNTKVDKXVEPKSCDKTHTCPPCPAPELLGGPSVFLFPPK |
| | | PKDTLMIS |
| 1657. | lightchain | LSASVGDXITITCRASQNIGSHLNWYQQKTGTAPKLLIYSTS |
| | | NLQDGVPSRFSGSGSGTDFTLTISSLLPEDFTIYYCQQSNSN |
| | | TPTFGGXTKVEAPSVFIFPPSDEQLKSGTASVVCLLNNFYPR |
| | | EAKVQWKVDNALQSGNSQESVTEQDSKDSTYSLSSTLTLS |
| | | KADYEKHKVYACEVTHQGLSSPVTKSFNRGEC*K |
| 1658. | VH_nuc | gcaggagtcgggcccaggactagtgaagccttcggagaccctgtccctcacttgca |
| | | gtgtctctggtgactccatcagtagttactattggagttggatccgccagcccgtcggg |
| | | aagcgaccggagtggattggccgtatttttaccagtggcagtaccaattataacccct |
| | | ccctaacgagtcgagtcactatgtcagtggacacgcccaagaaccagttctccctgc |
| | | acctgacctctgtgaccgccgcgga |
| 1659. | VL_nuc | ctgtctgcatctgtgggagacngaatcaccatcacttgccgggcaagtcagaatattg |
| | | gcagccatttaaattggtatcagcagaaaacagggacagcccctaagctcctgatct |
| | | attctacatccaatttgcaagatggggtcccatcaaggttcagtggcagtggatctggg |
| | | acagatttcactctcaccatcagcagtctgctacctgaagattttacaatttactactgtc |
| | | aacagagtaacagtaatact |
| SEQ ID NO | | 29BU7P1D1 |
| 1660. | CDR-H1 | GYTFSRYA |
| 1661. | CDR-H2 | INGGDGNT |
| 1662. | CDR-H3 | ARGRAYTYGRLSLSYAMDV |
| 1663. | CDR-L1 | QSLLHSNGYNY |
| 1664. | CDR-L2 | LGS |
| 1665. | CDR-L3 | MQGLQTPL |
| 1666. | VH | GAEVKKPGASVRVFCKASGYTFSRYAIHWVRRAPGQRLEW |
| | | MGRINGGDGNTDSSQKFQGRVTFTRDTSASTAYMELRSLR |
| | | SEDSAVFYCARGRAYTYGRLSLSYAMDVWGQGTTVTVSS |
| 1667. | VL | CRSSQSLLHSNGYNYLDWYLQKPGQPPQLLIYLGSNRASG |
| | | VPDRFSXXGSGTXFTLXISRVEAEDVGVYYCMQGLQTPLXG |
| | | PGTR |
| 1668. | FR-H1 | GAEVKKPGASVRVFCKAS |
| 1669. | FR-H2 | IHWVRRAPGQRLEWMGR |
| 1670. | FR-H3 | DSSQKFQGRVTFTRDTSASTAYMELRSLRSEDSAVFYC |
| 1671. | FR-H4 | WGQGTTVTVSS |
| 1672. | FR-L1 | CRSS |
| 1673. | FR-L2 | LDWYLQKPGQPPQLLIY |
| 1674. | FR-L3 | NRASGVPDRFSXXGSGTXFTLXISRVEAEDVGVYYC |
| 1675. | FR-L4 | XGPGTR |
| 1676. | heavychain | GAEVKKPGASVRVFCKASGYTFSRYAIHWVRRAPGQRLEW |
| | | MGRINGGDGNTDSSQKFQGRVTFTRDTSASTAYMELRSLR |
| | | SEDSAVFYCARGRAYTYGRLSLSYAMDVWGQGTTVTVSSK |
| | | GPSVFPLAPSSKSTSGGTAALGXLVKDYFPEPVTVSWNSGA |
| | | LTSGVHTFPAVLQSSGLYSLSSVVTVPSSSLGTQTYICNVNH |
| | | KPSNTKVDKXVEPKSCDKTHTCPPCPAPELLGGPSVFLFPP |
| | | KPKDTLMISRT |
| 1677. | lightchain | CRSSQSLLHSNGYNYLDWYLQKPGQPPQLLIYLGSNRASG |
| | | VPDRFSXXGSGTXFTLXISRVEAEDVGVYYCMQGLQTPLXG |
| | | PGTRAPSVFIFPPSDEQLKSGTASVVCLLNNFYPREAKVQW |
| | | KVDNALQSGNSQESVTEQDSKDSTYSLSSTLTLSKADYEKH |
| | | KVYACEVTHQGLSSPVTKSFNRGEC*K |
| 1678. | VH_nuc | ggggctgaggtgaagaagcctggggcctcagtgagggttttctgcaaggcctctgg |
| | | atacaccttcagtaggtatgcaatacattgggtgcgccgggcacccggacaaaggc |
| | | ttgagtggatgggaaggatcaacggtggagatggcaacacagactcttcacagaa |
| | | gttccagggcagagtcacctttaccagggacacatccgcgagcacagcctatatgg |
| | | agctgaggagcctcagatctgaagactcggct |
| 1679. | VL_nuc | ctgcaggtctagtcagagcctcctgcatagtaatggatacaactatttggattggtacct |
| | | gcagaagccagggcagcctccacagctcctgatctatttgggttctaatcgggcctcc |
| | | ggggtccctgacaggttcagtkgyrgtggatcaggyacwgaktttacactgawaatc |
| | | agcagagtggaggctgaggatgttggggtttattactgcatgcaaggtctacaaactc |
| | | ccctttncggccctggnaccag |
| SEQ ID NO | | 29BU7P1D3 |
| 1680. | CDR-H1 | GYTFTSKG |
| 1681. | CDR-H2 | ISAYDGNT |
| 1682. | CDR-H3 | ATSGSPRAGRDSTVAFDY |
| 1683. | CDR-L1 | QSVISSY |
| 1684. | CDR-L2 | GAS |
| 1685. | CDR-L3 | HQYGSSPGT |
| 1686. | VH | VQSGAEVKKPGASVKVSCRASGYTFTSKGITWVRQAPGQG |
| | | LEWMGWISAYDGNTNYAQKFQGRVTMTTDTSTRTAYMELR |
| | | SLRSDDTAVYHCATSGSPRAGRDSTVAFDYWGQGTLVTVS |
| | | P |
| 1687. | VL | PGXRATLSCRASQSVISSYLAWYQQKPGQAPRLLIYGASSR |
| | | VTGIPDRFSGSQSGTDFTFTISRLEPEDFAVYYCHQYGSSP |
| | | GTFGQXTK |
| 1688. | FR-H1 | VQSGAEVKKPGASVKVSCRAS |
| 1689. | FR-H2 | ITWVRQAPGQGLEWMGW |
| 1690. | FR-H3 | NYAQKFQGRVTMTTDTSTRTAYMELRSLRSDDTAVYHC |
| 1691. | FR-H4 | WGQGTLVTVSP |
| 1692. | FR-L1 | PGXRATLSCRAS |
| 1693. | FR-L2 | LAWYQQKPGQAPRLLIY |
| 1694. | FR-L3 | SRVTGIPDRFSGSQSGTDFTFTISRLEPEDFAVYYC |
| 1695. | FR-L4 | FGQXTK |
| 1696. | heavychain | VQSGAEVKKPGASVKVSCRASGYTFTSKGITWVRQAPGQG |
| | | LEWMGWISAYDGNTNYAQKFQGRVTMTTDTSTRTAYMELR |
| | | SLRSDDTAVYHCATSGSPRAGRDSTVAFDYWGQGTLVTVS |
| | | PKGPSVFPLAPSSKSTSGGTAALGXLVKDYFPEPVTVSWNS |
| | | GALTSGVHTFPAVLQSSGLYSLSSVVTVPSSSLGTQTYICNV |
| | | NHKPSNTKVDKXVEPKSCDKTHTCPPCPAPELLGGPSVFLF |
| | | PPKPKDTLMIS |
| 1697. | lightchain | PGXRATLSCRASQSVISSYLAWYQQKPGQAPRLLIYGASSR |
| | | VTGIPDRFSGSQSGTDFTFTISRLEPEDFAVYYCHQYGSSP |
| | | GTFGQXTKAPSVFIFPPSDEQLKSGTASVVCLLNNFYPREA |
| | | KVQWKVDNALQSGNSQESVTEQDSKDSTYSLSSTLTLSKA |
| | | DYEKHKVYACEVTHQGLSSPVTKSFNRGEC*K |
| 1698. | VH_nuc | gtgcagtctggagctgaggtgaagaagccgggggcctcagtgaaggtctcctgcag |
| | | ggcttctggttacacctttaccagcaagggtatcacctgggtgcgacaggcccctgga |
| | | caagggcttgagtggatgggatggatcagcgcttacgatggtaacacaaactatgc |
| | | acagaaattccagggtagagtcaccatgaccacagacacatccacgaggactgcc |
| | | tacatggagctgaggagcctgagatctgac |
| 1699. | VL_nuc | ctccrgggnnnagagccaccctctcctgcagggccagtcagagtgttatcagcagct |
| | | acttagcctggtaccagcagaagcctggccaggctcccaggctcctcatctatggtg |
| | | catccagcagggtcactggcatcccagacaggttcagtggcagtcagtctgggaca |
| | | gacttcactttcaccatcagcagactggagcctgaagattttgcagtgtattactgtcac |
| | | cagtatggtagctcacctgggacgt |
| SEQ ID NO | | 29BU7P1D12 |
| 1700. | CDR-H1 | GFTFSPYS |
| 1701. | CDR-H2 | ISASGDKR |
| 1702. | CDR-H3 | ARDQLENFESGGYYWPLAFDV |
| 1703. | CDR-L1 | EDIGTY |
| 1704. | CDR-L2 | VAS |
| 1705. | CDR-L3 | QQLNSYPLT |
| 1706. | VH | RCKLVESGGGLVQPGGSLRLSCVASGFTFSPYSMNWVRQ |
| | | APGKGLEWISYISASGDKRDSADSVKGRFIISRDNSQNSLYL |
| | | QLNSLRVDDTAVYYCARDQLENFESGGYYWPLAFDVWGQ |
| | | GTTVTVSS |
| 1707. | VL | SVGXXLTITCRASEDIGTYLAWYQQKPGTAPKLLIYVASTLQ |
| | | TGVPSRFSGSGSRTEFTLTINSLQPEDIATYYCQQLNSYPLT |
| | | FGGXT |
| 1708. | FR-H1 | RCKLVESGGGLVQPGGSLRLSCVAS |
| 1709. | FR-H2 | MNWVRQAPGKGLEWISY |
| 1710. | FR-H3 | DSADSVKGRFIISRDNSQNSLYLQLNSLRVDDTAVYYC |
| 1711. | FR-H4 | WGQGTTVTVSS |
| 1712. | FR-L1 | SVGXXLTITCRAS |
| 1713. | FR-L2 | LAWYQQKPGTAPKLLIY |
| 1714. | FR-L3 | TLQTGVPSRFSGSGSRTEFTLTINSLQPEDIATYYC |
| 1715. | FR-L4 | FGGXT |
| 1716. | heavychain | RCKLVESGGGLVQPGGSLRLSCVASGFTFSPYSMNWVRQ |
| | | APGKGLEWISYISASGDKRDSADSVKGRFIISRDNSQNSLYL |
| | | QLNSLRVDDTAVYYCARDQLENFESGGYYWPLAFDVWGQ |
| | | GTTVTVSSKGPSVFPLAPSSKSTSGGTAALGXLVKDYFPEP |
| | | VTVSWNSGALTSGVHTFPAVLQSSGLYSLSSVVTVPSSSLG |
| | | TQTYICNVNHKPSNTKVDKXVEPKSCDKTHTCPPCPAPELL |
| | | GGPSVFLFPPKP |
| 1717. | lightchain | SVGXXLTITCRASEDIGTYLAWYQQKPGTAPKLLIYVASTLQ |
| | | TGVPSRFSGSGSRTEFTLTINSLQPEDIATYYCQQLNSYPLT |
| | | FGGXTAPSVFIFPPSDEQLKSGTASVVCLLNNFYPREAKVQ |
| | | WKVDNALQSGNSQESVTEQDSKDSTYSLSSTLTLSKADYE |
| | | KHKVYACEVTHQGLSSPVTKSFNRGEC*K |
| 1718. | VH_nuc | aggtgcaagctggtggagtctgggggaggcttggtccagccgggggggtccctga |
| | | gactctcctgtgtagcctctggattcaccttcagtccctacagtatgaactgggtccgcc |
| | | aggctccagggaagggactggaatggatttcatacattagtgctagtggagataaaa |
| | | gagactctgcagactctgtgaagggccgattcatcatctccagagacaactcccaga |
| | | actcactgtacctccaactcaacagt |
| 1719. | VL_nuc | atctgtagggracannctcaccatcacttgccgggccagtgaagacattggcacttat |
| | | ttagcctggtatcaacaaaaaccagggacagcccctaaactcctgatctatgttgcat |
| | | ccactttgcaaactggggtcccatcaaggttcagcggcagtggatctaggacagaat |
| | | tcactctcacaatcaacagcctgcagcctgaagatattgcgacttattactgtcaacaa |
| | | cttaatagttacccgctcacttt |
| SEQ ID NO | | 33BU7P1A11 |
| 1720. | CDR-H1 | GFMFSRFV |
| 1721. | CDR-H2 | MSYDEKNK |
| 1722. | CDR-H3 | VRGAYESSGHSFDH |
| 1723. | CDR-L1 | QSVGVH |
| 1724. | CDR-L2 | HTS |
| 1725. | CDR-L3 | QHRSTWPPAWT |
| 1726. | VH | VESGGGVVQPGKSLRLSCAASGFMFSRFVLHWVRQAPGK |
| | | GLEWVAVMSYDEKNKDYADSVKGRFTISRDNSKNTLDLQM |
| | | TTVTPEDTAVYYCVRGAYESSGHSFDHWGQGTLVTVSS |
| 1727. | VL | PGXGATLSCRASQSVGVHLAWYQQRPGQAPRLLLWHTSN |
| | | RATDIPARFSGSGSGTDFTLTISSLEPEDFAIYYCQHRSTWP |
| | | PAWTFGQXTK |
| 1728. | FR-H1 | VESGGGVVQPGKSLRLSCAAS |
| 1729. | FR-H2 | LHWVRQAPGKGLEWVAV |
| 1730. | FR-H3 | DYADSVKGRFTISRDNSKNTLDLQMTTVTPEDTAVYYC |
| 1731. | FR-H4 | WGQGTLVTVSS |
| 1732. | FR-L1 | PGXGATLSCRAS |
| 1733. | FR-L2 | LAWYQQRPGQAPRLLLW |
| 1734. | FR-L3 | NRATDIPARFSGSGSGTDFTLTISSLEPEDFAIYYC |
| 1735. | FR-L4 | FGQXTK |
| 1736. | heavychain | VESGGGVVQPGKSLRLSCAASGFMFSRFVLHWVRQAPGK |
| | | GLEWVAVMSYDEKNKDYADSVKGRFTISRDNSKNTLDLQM |
| | | TTVTPEDTAVYYCVRGAYESSGHSFDHWGQGTLVTVSSKG |
| | | PSVFPLAPSSKSTSGGTAALGXLVKDYFPEPVTVSWNSGAL |
| | | TSGVHTFPAVLQSSGLYSLSSVVTVPSSSLGTQTYICNVNHK |
| | | PSNTKVDKXVEPKSCDKTHTCPPCPAPELLGGPSVFLFPPK |
| | | PKDTLMISRTPE |
| 1737. | lightchain | PGXGATLSCRASQSVGVHLAWYQQRPGQAPRLLLWHTSN |
| | | RATDIPARFSGSGSGTDFTLTISSLEPEDFAIYYCQHRSTWP |
| | | PAWTFGQXTKAPSVFIFPPSDEQLKSGTASVVCLLNNFYPR |
| | | EAKVQWKVDNALQSGNSQESVTEQDSKDSTYSLSSTLTLS |
| | | KADYEKHKVYACEVTHQGLSSPVTKSFNRGEC*K |
| 1738. | VH_nuc | tggtggagtctgggggaggcgtggtccagcctgggaagtccctgcgactctcctgtg |
| | | cagcctctggattcatgttcagtaggtttgttctgcactgggtccgccaggccccgggc |
| | | aagggcctagagtgggtggcagttatgtcatatgatgaaaagaataaagactacgc |
| | | agactccgtgaagggccgattcaccatctccagagacaattccaagaacacgctgg |
| | | atctgcagatgactacagtgacacctg |
| 1739. | VL_nuc | ctccngggnnaggagccactctctcctgcagggccagtcagagtgttggcgtccact |
| | | tagcctggtaccaacagagacctggccaggctcccaggctcctcttgtggcatacat |
| | | ccaacagggccactgacatcccagccaggttcagcggcagtgggtctgggacaga |
| | | cttcactctcaccatcagcagccttgagcctgaagattttgcaatttattactgtcagcac |
| | | cgtagcacctggcctccggcgtgga |
| SEQ ID NO | | 33BU7P1B2 |
| 1740. | CDR-H1 | QFRFHRYA |
| 1741. | CDR-H2 | ISDVGRNE |
| 1742. | CDR-H3 | ARTMDYDRHNNYFGLDV |
| 1743. | CDR-L1 | HSVSSNF |
| 1744. | CDR-L2 | GSS |
| 1745. | CDR-L3 | QHYGDSPPYT |
| 1746. | VH | XLVESGGSVVQPGRSLRLSCGGSQFRFHRYALHWVRQVP |
| | | GKGLEWLAVISDVGRNEHYADSVKGRFTISRDNSQNMFYL |
| | | QMNSLRAEDTAVYFCARTMDYDRHNNYFGLDVWGQGTTVI |
| | | VSS |
| 1747. | VL | GXRVTLSCRTSHSVSSNFLAWYQQRPGQAPRLLIYGSSIRA |
| | | AGIPDRISGSGSGTDFTLTISRLEPEDFAVYFCQHYGDSPPY |
| | | TXGQXTK |
| 1748. | FR-H1 | XLVESGGSVVQPGRSLRLSCGGS |
| 1749. | FR-H2 | LHWVRQVPGKGLEWLAV |
| 1750. | FR-H3 | HYADSVKGRFTISRDNSQNMFYLQMNSLRAEDTAVYFC |
| 1751. | FR-H4 | WGQGTTVIVSS |
| 1752. | FR-L1 | GXRVTLSCRTS |
| 1753. | FR-L2 | LAWYQQRPGQAPRLLIY |
| 1754. | FR-L3 | IRAAGIPDRISGSGSGTDFTLTISRLEPEDFAVYFC |
| 1755. | FR-L4 | XGQXTK |
| 1756. | heavychain | XLVESGGSVVQPGRSLRLSCGGSQFRFHRYALHWVRQVP |
| | | GKGLEWLAVISDVGRNEHYADSVKGRFTISRDNSQNMFYL |
| | | QMNSLRAEDTAVYFCARTMDYDRHNNYFGLDVWGQGTTVI |
| | | VSSKGPSVFPLAPSSKSTSGGTAALGXLVKDYFPEPVTVSW |
| | | NSGALTSGVHTFPAVLQSSGLYSLSSVVTVPSSSLGTQTYIC |
| | | NVNHKPSNTKVDKXVEPKSCDKTHTCPPCPAPELLGGPSVF |
| | | LFPPKPKDTLMI |
| 1757. | lightchain | GXRVTLSCRTSHSVSSNFLAWYQQRPGQAPRLLIYGSSIRA |
| | | AGIPDRISGSGSGTDFTLTISRLEPEDFAVYFCQHYGDSPPY |
| | | TXGQXTKAPSVFIFPPSDEQLKSGTASVVCLLNNFYPREAKV |
| | | QWKVDNALQSGNSQESVTEQDSKDSTYSLSSTLTLSKADY |
| | | EKHKVYACEVTHQGLSSPVTKSFNRGEC*K |
| 1758. | VH_nuc | canctggtggagtctgggggaagcgtagtccagcctgggaggtccctgagactctc |
| | | ctgtggaggctctcaattcaggttccatagatacgctctacactgggtccgccaggttc |
| | | ctgggaaggggctggagtggttggcagtcatctcagatgttggcaggaatgagcact |
| | | atgcagactccgtgaagggccgcttcacgatctccagagacaactcccagaatatgt |
| | | tctatctccaaatgaacagcctgaga |
| 1759. | VL_nuc | caggggnncgggtcaccctctcttgcaggacaagtcacagtgtcagcagcaacttct |
| | | tagcctggtaccagcagagacctggccaggctcccaggctcctcatttacggttcatc |
| | | catcagggccgctggcatcccagacaggatcagtggcagtgggtctgggactgact |
| | | tcactctcaccatcagtagactggagcctgaagattttgcagtgtatttttgtcaacacta |
| | | tggtgactcacctccgtacactt |
| SEQ ID NO | | 33BU7P1D11 |
| 1760. | CDR-H1 | GFDFGDDG |
| 1761. | CDR-H2 | INWNGNKR |
| 1762. | CDR-H3 | ARVNGRWLQLEN |
| 1763. | CDR-L1 | QRIDSY |
| 1764. | CDR-L2 | AAS |
| 1765. | CDR-L3 | QQSYSTPRT |
| 1766. | VH | ESGGGVVRPGESLRLSCEVSGFDFGDDGMTWVRQGPGKG |
| | | LEWVSGINWNGNKRGYADSVKGRFTISRDNTKNSLYLQMT |
| | | SLRAEDTAFYYCARVNGRWLQLENWGQGILVTVSS |
| 1767. | VL | ASIGDRVTITCQASQRIDSYLNWYQQKPGKAPKLLIYAASRL |
| | | QSGVPSRFSGRESGTDFTLTISSLQSEDFATYYCQQSYSTP |
| | | RTFGQXT |
| 1768. | FR-H1 | ESGGGVVRPGESLRLSCEVS |
| 1769. | FR-H2 | MTWVRQGPGKGLEWVSG |
| 1770. | FR-H3 | GYADSVKGRFTISRDNTKNSLYLQMTSLRAEDTAFYYC |
| 1771. | FR-H4 | WGQGILVTVSS |
| 1772. | FR-L1 | ASIGDRVTITCQAS |
| 1773. | FR-L2 | LNWYQQKPGKAPKLLIY |
| 1774. | FR-L3 | RLQSGVPSRFSGRESGTDFTLTISSLQSEDFATYYC |
| 1775. | FR-L4 | FGQXT |
| 1776. | heavychain | ESGGGVVRPGESLRLSCEVSGFDFGDDGMTWVRQGPGKG |
| | | LEWVSGINWNGNKRGYADSVKGRFTISRDNTKNSLYLQMT |
| | | SLRAEDTAFYYCARVNGRWLQLENWGQGILVTVSSKGPSV |
| | | FPLAPSSKSTSGGTAALGXLVKDYFPEPVTVSWNSGALTSG |
| | | VHTFPAVLQSSGLYSLSSVVTVPSSSLGTQTYICNVNHKPSN |
| | | TKVDKXVEPKSCDKTHTCPPCPAPELLGGPSVFLFPPKPKD |
| | | TLMISRTPEVTC |
| 1777. | lightchain | ASIGDRVTITCQASQRIDSYLNWYQQKPGKAPKLLIYAASRL |
| | | QSGVPSRFSGRESGTDFTLTISSLQSEDFATYYCQQSYSTP |
| | | RTFGQXTAPSVFIFPPSDEQLKSGTASVVCLLNNFYPREAKV |
| | | QWKVDNALQSGNSQESVTEQDSKDSTYSLSSTLTLSKADY |
| | | EKHKVYACEVTHQGLSSPVTKSFNRGEC*K |
| 1778. | VH_nuc | gagtctgggggaggtgtggtacggcctggggagtccctgagactgtcctgtgaagtc |
| | | tctgggtttgactttggtgatgatggcatgacctgggtccgccaaggtccagggaagg |
| | | ggctggaatgggtctctggaattaattggaatggaaataagagaggttatgcagact |
| | | ctgtgaagggccgattcaccatctctagagacaacaccaagaactccctctatctac |
| | | aaatgaccagtctcagagccgaggac |
| 1779. | VL_nuc | gcatctataggagacagagtcaccatcacttgccaggcaagtcagaggattgacag |
| | | ttatttaaattggtatcagcagaaaccagggaaagcccctaagctcctgatctatgctg |
| | | catcccgcttgcaaagtggggtcccatcgaggttcagtggccgtgaatctgggacag |
| | | atttcactctcaccatcagcagtctccaatctgaagattttgcaacttactactgtcaaca |
| | | gagttacagtacccctcgaacg |
| SEQ ID NO | | 89BU7P1A12 |
| 1780. | CDR-H1 | GGSISRYY |
| 1781. | CDR-H2 | IYYSDTP |
| 1782. | CDR-H3 | ARHNEPYGGNSDDYFDL |
| 1783. | CDR-L1 | QTISDY |
| 1784. | CDR-L2 | GAS |
| 1785. | CDR-L3 | QQSYSIPLT |
| 1786. | VH | QESGPGLVKPSETLSLTCSVSGGSISRYYWSWIRQPPGQG |
| | | LEWIAGIYYSDTPKYNPSLESRVTLSVDTSKNQFSLKLTSMT |
| | | AADTAVYYCARHNEPYGGNSDDYFDLWGQGTLVTVSS |
| 1787. | VL | QSPSSLSAFVGDRVTITCRASQTISDYLNWYQHKPGKGPILL |
| | | IYGASRLESGVPSRFTGSGSGTDFTLTIDSLEAEDFATYYCQ |
| | | QSYSIPLTFGGGTKVEMK |
| 1788. | FR-H1 | QESGPGLVKPSETLSLTCSVS |
| 1789. | FR-H2 | WSWIRQPPGQGLEWIAG |
| 1790. | FR-H3 | KYNPSLESRVTLSVDTSKNQFSLKLTSMTAADTAVYYC |
| 1791. | FR-H4 | WGQGTLVTVSS |
| 1792. | FR-L1 | QSPSSLSAFVGDRVTITCRAS |
| 1793. | FR-L2 | LNWYQHKPGKGPILLIY |
| 1794. | FR-L3 | RLESGVPSRFTGSGSGTDFTLTIDSLEAEDFATYYC |
| 1795. | FR-L4 | FGGGTKVEMK |
| 1796. | heavychain | QESGPGLVKPSETLSLTCSVSGGSISRYYWSWIRQPPGQG |
| | | LEWIAGIYYSDTPKYNPSLESRVTLSVDTSKNQFSLKLTSMT |
| | | AADTAVYYCARHNEPYGGNSDDYFDLWGQGTLVTVSSKGP |
| | | SVFPLAPSSKSTSGGTAALGXLVKDYFPEPVTVSWNSGALT |
| | | SGVHTFPAVLQSSGLYSLSSVVTVPSSSLGTQTYICNVNHK |
| | | PSNTKVDKXVEPKSCDKTHTCPPCPAPELLGGPSVFLFPPK |
| | | PKDTLMISRT |
| 1797. | lightchain | QSPSSLSAFVGDRVTITCRASQTISDYLNWYQHKPGKGPILL |
| | | IYGASRLESGVPSRFTGSGSGTDFTLTIDSLEAEDFATYYCQ |
| | | QSYSIPLTFGGGTKVEMKAPSVFIFPPSDEQLKSGTASVVCL |
| | | LNNFYPREAKVQWKVDNALQSGNSQESVTEQDSKDSTYSL |
| | | SSTLTLSKADYEKHKVYACEVTHQGLSSPVTKSFNRGEC*K |
| 1798. | VH_nuc | caggagtcgggcccaggactggtgaagccctcggaaaccctgtccctcacctgca |
| | | gtgtctctggtggctccatcagtcgttactactggagctggatccggcagcccccagg |
| | | gcaggggctggagtggattgccggtatctattacagtgacacccccaagtacaacc |
| | | cctccctcgagagtcgagtcaccctatcagtagacacgtccaagaaccagttttccct |
| | | gaagctgacctctatgaccgccgcagac |
| 1799. | VL_nuc | ccagtctccatcctccctgtctgcatttgtaggagacagagtcaccattacttgccggg |
| | | caagtcagaccataagcgactatttaaattggtatcaacataaaccaggaaaaggc |
| | | cccatcctcctcatctatggcgcatcccgtttggaaagtggggtcccatcaaggttcac |
| | | tggcagcggatctgggacagatttcactctcaccatcgacagtctggaagctgaaga |
| | | ttttgcaacttattactgtcaaca |
| SEQ ID NO | | 89BU7P1B10 |
| 1800. | CDR-H1 | GGSIGRHY |
| 1801. | CDR-H2 | IYDSGST |
| 1802. | CDR-H3 | ARHNAPYGGNSDDYFEF |
| 1803. | CDR-L1 | ETISDY |
| 1804. | CDR-L2 | AAS |
| 1805. | CDR-L3 | QQSYSVPLT |
| 1806. | VH | QESGPGLVKPSETLSLTCTVSGGSIGRHYWSWIRQPPGKG |
| | | LEWIAYIYDSGSTKYNPSLESRVTISEDTSQNQFSLKLTSVTA |
| | | ADTAIYYCARHNAPYGGNSDDYFEFWGPGTLVTVSS |
| 1807. | VL | TQSPSSLSASVGDRVTITCRANETISDYLNWYQGKPGTAPK |
| | | PLIYAASSLQSGVPSRFSGSGSETYFTLTISSLOPEDFATYY |
| | | CQQSYSVPLTFGGGTKVESK |
| 1808. | FR-H1 | QESGPGLVKPSETLSLTCTVS |
| 1809. | FR-H2 | WSWIRQPPGKGLEWIAY |
| 1810. | FR-H3 | KYNPSLESRVTISEDTSQNQFSLKLTSVTAADTAIYYC |
| 1811. | FR-H4 | WGPGTLVTVSS |
| 1812. | FR-L1 | TQSPSSLSASVGDRVTITCRAN |
| 1813. | FR-L2 | LNWYQGKPGTAPKPLIY |
| 1814. | FR-L3 | SLQSGVPSRFSGSGSETYFTLTISSLOPEDFATYYC |
| 1815. | FR-L4 | FGGGTKVESK |
| 1816. | heavychain | QESGPGLVKPSETLSLTCTVSGGSIGRHYWSWIRQPPGKG |
| | | LEWIAYIYDSGSTKYNPSLESRVTISEDTSQNQFSLKLTSVTA |
| | | ADTAIYYCARHNAPYGGNSDDYFEFWGPGTLVTVSSKGPS |
| | | VFPLAPSSKSTSGGTAALGXLVKDYFPEPVTVSWNSGALTS |
| | | GVHTFPAVLQSSGLYSLSSVVTVPSSSLGTQTYICNVNHKP |
| | | SNTKVDKXVEPKSCDKTHTCPPCPAPELLGGPSVFLFPPKP |
| | | KDTLMISRT |
| 1817. | lightchain | TQSPSSLSASVGDRVTITCRANETISDYLNWYQGKPGTAPK |
| | | PLIYAASSLQSGVPSRFSGSGSETYFTLTISSLOPEDFATYY |
| | | CQQSYSVPLTFGGGTKVESKAPSVFIFPPSDEQLKSGTASV |
| | | VCLLNNFYPREAKVQWKVDNALQSGNSQESVTEQDSKDST |
| | | YSLSSTLTLSKADYEKHKVYACEVTHQGLSSPVTKSFNRGE |
| | | C*K |
| 1818. | VH_nuc | caggagtcgggcccaggcctggtgaagccttcggagaccctgtccctcacctgcac |
| | | tgtctctggtggctccatcggtcgtcactactggagctggatccggcagcccccaggg |
| | | aaggggctggagtggattgcatatatctatgacagtgggagcaccaagtacaaccc |
| | | ctccctcgagagtcgagtcaccatttcagaagacacgtcccagaaccagttctccct |
| | | gaagctgacctctgtgaccgccgcagac |
| 1819. | VL_nuc | gacccagtctccatcctccctgtctgcatctgtaggagacagagtcaccatcacttgcc |
| | | gggcaaatgagaccattagcgactatttaaattggtatcagggcaaaccagggaca |
| | | gcccctaaacccctgatctatgctgcatccagtttgcaaagtggggtcccatcaaggtt |
| | | cagtggcagtggatctgagacatatttcactctcaccatcagcagtctgcaacctgag |
| | | gattttgcaacttactactgtca |
| SEQ ID NO | | 93BU7P1B12 |
| 1820. | CDR-H1 | GYPFTRFD |
| 1821. | CDR-H2 | MNPKSGNT |
| 1822. | CDR-H3 | AKGVESSF |
| 1823. | CDR-L1 | QSLLDTSNNKNY |
| 1824. | CDR-L2 | WAS |
| 1825. | CDR-L3 | QQYYETPYI |
| 1826. | VH | VQSGAEVKKPGASVKVSCKASGYPFTRFDINWVRQAPGQG |
| | | LEWVGWMNPKSGNTGHALKFQGRVAMTRNTSISTAYMELN |
| | | SLTSEDTATYFCAKGVESSFWGPGTTVIVSS |
| 1827. | VL | GERATINCKSSQSLLDTSNNKNYLGWYQQKRGQPPKLLIYW |
| | | ASNRESGVPDRFSGSGSGTEFTLTINSLQAEDVAVYYCQQY |
| | | YETPYIXG |
| 1828. | FR-H1 | VQSGAEVKKPGASVKVSCKAS |
| 1829. | FR-H2 | INWVRQAPGQGLEWVGW |
| 1830. | FR-H3 | GHALKFQGRVAMTRNTSISTAYMELNSLTSEDTATYFC |
| 1831. | FR-H4 | WGPGTTVIVSS |
| 1832. | FR-L1 | GERATINCKSS |
| 1833. | FR-L2 | LGWYQQKRGQPPKLLIY |
| 1834. | FR-L3 | NRESGVPDRFSGSGSGTEFTLTINSLQAEDVAVYYC |
| 1835. | FR-L4 | XG |
| 1836. | heavychain | VQSGAEVKKPGASVKVSCKASGYPFTRFDINWVRQAPGQG |
| | | LEWVGWMNPKSGNTGHALKFQGRVAMTRNTSISTAYMELN |
| | | SLTSEDTATYFCAKGVESSFWGPGTTVIVSSKGPSVFPLAP |
| | | SSKSTSGGTAALGXLVKDYFPEPVTVSWNSGALTSGVHTFP |
| | | AVLQSSGLYSLSSVVTVPSSSLGTQTYICNVNHKPSNTKVD |
| | | KXVEPKSCDKTHTCPPCPAPELLGGPSVFLFPPKPKDTLMIS |
| | | RTPEVTCVVV |
| 1837. | lightchain | GERATINCKSSQSLLDTSNNKNYLGWYQQKRGQPPKLLIYW |
| | | ASNRESGVPDRFSGSGSGTEFTLTINSLQAEDVAVYYCQQY |
| | | YETPYIXGAPSVFIFPPSDEQLKSGTASVVCLLNNFYPREAK |
| | | VQWKVDNALQSGNSQESVTEQDSKDSTYSLSSTLTLSKAD |
| | | YEKHKVYACEVTHQGLSSPVTKSFNRGEC*K |
| 1838. | VH_nuc | gtgcaatctggggctgaggtgaagaagcctggggcctcagtgaaggtctcctgcaa |
| | | ggcttctggataccccttcaccagatttgatataaactgggtgcgacaggcccctgga |
| | | caaggacttgagtgggtggggtggatgaatcctaagagtggcaatacaggccatgc |
| | | actgaagttccagggcagagtcgccatgaccaggaacacctccataagcacagcc |
| | | tacatggagctgaacagcctgacatctgaa |
| 1839. | VL_nuc | gggcgagagggccactatcaactgcaagtccagtcagagtcttttggacacctcca |
| | | acaataagaattacttaggttggtaccagcagaaaaggggacagcctcctaaactg |
| | | ctcatttactgggcttccaaccgggaatccggggtccctgaccgattcagtggcagcg |
| | | ggtctgggacagagttcactctcaccatcaacagcctgcaggctgaagatgtggca |
| | | gtttattactgtcagcagtattatgagac |
| SEQ ID NO | | 13FU1P1B4 |
| 1840. | CDR-H1 | GGSISSYY |
| 1841. | CDR-H2 | IFTSGST |
| 1842. | CDR-H3 | VRDRRGLLYSNIWYWSFDL |
| 1843. | CDR-L1 | QSITNY |
| 1844. | CDR-L2 | AAS |
| 1845. | CDR-L3 | QQSYSTPWT |
| 1846. | VH | QVQLXXXGPGXVKPSETLSLTCSVSGGSISSYYWGWIRQPP |
| | | GKGLEWIGRIFTSGSTNYNPSLESRVTMSVDMSKNQFSLSL |
| | | SSVTAADTAVYYCVRDRRGLLYSNIWYWSFDLWGRGTLVT |
| | | VSS |
| 1847. | VL | QSPSSLSASAGDRVTITCRASQSITNYLNWYQQKPMRAPKL |
| | | LIYAASTLQSGVPSRFSGSGSGTDFTLTISSLOPEDFATYYC |
| | | QQSYSTPWTFGQGTKVEIR |
| 1848. | FR-H1 | QVQLXXXGPGXVKPSETLSLTCSVS |
| 1849. | FR-H2 | WGWIRQPPGKGLEWIGR |
| 1850. | FR-H3 | NYNPSLESRVTMSVDMSKNQFSLSLSSVTAADTAVYYC |
| 1851. | FR-H4 | WGRGTLVTVSS |
| 1852. | FR-L1 | QSPSSLSASAGDRVTITCRAS |
| 1853. | FR-L2 | LNWYQQKPMRAPKLLIY |
| 1854. | FR-L3 | TLQSGVPSRFSGSGSGTDFTLTISSLOPEDFATYYC |
| 1855. | FR-L4 | FGQGTKVEIR |
| 1856. | heavychain | QVQLXXXGPGXVKPSETLSLTCSVSGGSISSYYWGWIRQPP |
| | | GKGLEWIGRIFTSGSTNYNPSLESRVTMSVDMSKNQFSLSL |
| | | SSVTAADTAVYYCVRDRRGLLYSNIWYWSFDLWGRGTLVT |
| | | VSSKGPSVFPLAPSSKSTSGGTAALGXLVKDYFPEPVTVSW |
| | | NSGALTSGVHTFPAVLQSSGLYSLSSVVTVPSSSLGTQTYIC |
| | | NVNHKPSNTKVDKXVEPKSCDKTHTCPPCPAPELLGGPSVF |
| | | LFPPKPKDT |
| 1857. | lightchain | QSPSSLSASAGDRVTITCRASQSITNYLNWYQQKPMRAPKL |
| | | LIYAASTLQSGVPSRFSGSGSGTDFTLTISSLOPEDFATYYC |
| | | QQSYSTPWTFGQGTKVEIRAPSVFIFPPSDEQLKSGTASVV |
| | | CLLNNFYPREAKVQWKVDNALQSGNSQESVTEQDSKDSTY |
| | | SLSSTLTLSKADYEKHKVYACEVTHQGLSSPVTKSFNRGEC |
| | | *K |
| 1858. | VH_nuc | caggtgcagctgcannnntngggcccaggantggtgaagccttcggagaccctgt |
| | | ccctcacctgcagtgtctctggtggctccatcagtagttactactggggctggatccgg |
| | | cagccccccgggaagggactggagtggattgggcgtatttttaccagtgggagcac |
| | | caactataacccctccctcgagagtcgcgtcaccatgtcagtagacatgtccaagaa |
| | | ccagttctccctgagcctgagctctgtg |
| 1859. | VL_nuc | ccagtctccatcctccctgtctgcatctgcaggagacagagtcaccatcacttgccgg |
| | | gcaagtcagagcattactaactatttaaattggtatcaacagaaaccaatgagagcc |
| | | cctaagctcctgatctatgctgcatccactttgcaaagtggggtcccatcaaggttcagt |
| | | ggcagtggctctgggacagatttcactctcaccatcagcagtctgcaacctgaagatt |
| | | ttgcaacttactactgtcaaca |
| SEQ ID NO | | 15FU1P3A6 |
| 1860. | CDR-H1 | GVYFSDWA |
| 1861. | CDR-H2 | ISGRGANI |
| 1862. | CDR-H3 | AKTPLLTRAFDV |
| 1863. | CDR-L1 | QSVNTW |
| 1864. | CDR-L2 | KVS |
| 1865. | CDR-L3 | QQYNIDSRYS |
| 1866. | VH | LVESGGGSVPPGGSLRLSCVASGVYFSDWAMNWVRQAPG |
| | | KGLEWISSISGRGANIYYAESVRGRFTTSRDNSQNTVFLDLT |
| | | DLTVEDTALYFCAKTPLLTRAFDVWGQGTAVTVSA |
| 1867. | VL | DIVMTQSPSTLSASVGDRVTITCRASQSVNTWLAWYQQKP |
| | | GKAPRLLIYKVSTLESGVPSRFSGSGSGTEFTLTISSLQPDD |
| | | FATYYCQQYNIDSRYSFGPGTKVEIK |
| 1868. | FR-H1 | LVESGGGSVPPGGSLRLSCVAS |
| 1869. | FR-H2 | MNWVRQAPGKGLEWISS |
| 1870. | FR-H3 | YYAESVRGRFTTSRDNSQNTVFLDLTDLTVEDTALYFC |
| 1871. | FR-H4 | WGQGTAVTVSA |
| 1872. | FR-L1 | DIVMTQSPSTLSASVGDRVTITCRAS |
| 1873. | FR-L2 | LAWYQQKPGKAPRLLIY |
| 1874. | FR-L3 | TLESGVPSRFSGSGSGTEFTLTISSLQPDDFATYYC |
| 1875. | FR-L4 | FGPGTKVEIK |
| 1876. | heavychain | LVESGGGSVPPGGSLRLSCVASGVYFSDWAMNWVRQAPG |
| | | KGLEWISSISGRGANIYYAESVRGRFTTSRDNSQNTVFLDLT |
| | | DLTVEDTALYFCAKTPLLTRAFDVWGQGTAVTVSAKGPSVF |
| | | PLAPSSKSTSGGTAALGXLVKDYFPEPVTVSWNSGALTSGV |
| | | HTFPAVLQSSGLYSLSSVVTVPSSSLGTQTYICNVNHKPSNT |
| | | KVDKXVEPKSCDKTHTCPPCPAPELLGGPSVFLFPPKPKDT |
| | | LMISRTPEV |
| 1877. | lightchain | DIVMTQSPSTLSASVGDRVTITCRASQSVNTWLAWYQQKP |
| | | GKAPRLLIYKVSTLESGVPSRFSGSGSGTEFTLTISSLQPDD |
| | | FATYYCQQYNIDSRYSFGPGTKVEIKAPSVFIFPPSDEQLKS |
| | | GTASVVCLLNNFYPREAKVQWKVDNALQSGNSQESVTEQD |
| | | SKDSTYSLSSTLTLSKADYEKHKVYACEVTHQGLSSPVTKS |
| | | FNRGEC*K |
| 1878. | VH_nuc | ctggtggagtctgggggaggctcggttccgccgggggggtctttaagactctcctgtgt |
| | | ggcctctggagtttactttagcgactgggccatgaattgggtccgccaggctccaggg |
| | | aaggggctggagtggatctcaagtatcagcggccgcggcgctaacatatactacgc |
| | | cgagtccgtgaggggccgcttcaccacatccagagacaactcccagaacaccgtg |
| | | tttctggatttgaccgacctgacagtc |
| 1879. | VL_nuc | gacatcgtgatgacccagtctccttccaccctgtctgcatctgtcggagacagagtca |
| | | ccatcacctgccgggccagtcagtctgttaatacgtggttggcctggtatcagcagaa |
| | | accagggaaagcccctaggctcctgatctataaggtgtctactttagaaagcggagt |
| | | cccatcaaggttcagcggcagtgggtctgggacagagttcactctcaccatcagcag |
| | | cctgcagcctgatgattttgcaact |

| SEQ ID NO | Synthetic Peptides |
|---|---|
| 1880. | DPYS |
| 1881. | DPYSZS |
| 1882. | QSQLER |
| 1883. | KRELRNL |
| 1884. | KRELRNLPQ |
| 1885. | RQQEQQ |
| 1886. | QGRQQEQQF |
| 1887. | CEALQQ |

### Other Embodiments

[0275] All publications, patents, and patent applications mentioned in this specification are herein incorporated by reference to the same extent as if each independent publication or patent application was specifically and individually indicated to be incorporated by reference.

[0276] While the invention has been described in connection with specific embodiments thereof, it will be understood that it is capable of further modifications and this application is intended to cover any variations, uses, or adaptations of the invention following, in general, the principles of the invention and including such departures from the present disclosure that come within known or customary practice within the art to which the invention pertains and may be applied to the essential features hereinbefore set forth, and follows in the scope of the claims.

### P3:

[0277] 1. An isolated antibody that binds to Ara h 2 (conglutin-7), or an antigen-binding fragment thereof, wherein the antibody comprises the following six complementarity determining regions (CDRs):
[0278] (a) an CDR-H1 comprising the amino acid sequence of (SEQ ID NO: 1);
[0279] (b) an CDR-H2 comprising the amino acid sequence of (SEQ ID NO: 2);
[0280] (c) an CDR-H3 comprising the amino acid sequence of (SEQ ID NO: 3);
[0281] (d) an CDR-L1 comprising the amino acid sequence of (SEQ ID NO: 4);
[0282] (e) an CDR-L2 comprising the amino acid sequence of (SEQ ID NO: 5); and
[0283] (f) an CDR-L3 comprising the amino acid sequence of (SEQ ID NO: 6).
[0284] 2. The antibody of paragraph 1, wherein the antibody comprises
[0285] (a) a heavy chain variable (VH) domain comprising an amino sequence having at least 90%, at least 95%, or at least 99% sequence identity to the amino acid sequence of SEQ ID NO: 7;
[0286] (b) a light chain variable (VL) domain comprising an amino acid sequence having at least 90%, at least 95%, or at least 99% identity to the amino acid sequence of SEQ ID NO: 8; or (c) a VH domain as in (a) and a VL domain as in (b).
[0287] 3. The antibody of paragraph 1 or 2, further comprising the following VH domain framework regions (FRs):
[0288] (a) an FR-H1 comprising the amino acid sequence of (SEQ ID NO: 9);
[0289] (b) an FR-H2 comprising the amino acid sequence of (SEQ ID NO: 10);
[0290] (c) an FR-H3 comprising the amino acid sequence of (SEQ ID NO: 11); and
[0291] (d) an FR-H4 comprising the amino acid sequence of (SEQ ID NO: 12).
[0292] 4. The antibody of any one of paragraphs 1-3, wherein the VH domain comprises the amino acid sequence of SEQ ID NO: 7.
[0293] 5. The antibody of any one of paragraphs 1-4, further comprising the following VL domain FRs:
[0294] (a) an FR-L1 comprising the amino acid sequence of (SEQ ID NO: 13);
[0295] (b) an FR-L2 comprising the amino acid sequence of (SEQ ID NO: 14);
[0296] (c) an FR-L3 comprising the amino acid sequence of (SEQ ID NO: 15); and
[0297] (d) an FR-L4 comprising the amino acid sequence of (SEQ ID NO: 16).
[0298] 6. The antibody of any one of paragraphs 1-5, wherein the VL domain comprises the amino acid sequence of SEQ ID NO: 8.
[0299] 7. An isolated antibody that binds to Ara h 2, or an antigen-binding fragment thereof, wherein the antibody comprises
[0300] (a) a VH domain comprising an amino acid sequence having at least 90%, at least 95%, or at least 99% sequence identity to the amino acid sequence of SEQ ID NO: 7 and
[0301] (b) a VL domain comprising an amino acid sequence having at least 90%, at least 95%, or at least 99% sequence identity to the amino acid sequence of SEQ ID NO: 8.
[0302] 8. The antibody of paragraph 7, wherein the antibody comprises a VH domain comprising the amino acid sequence of SEQ ID NO: 7 and a VL domain comprising the amino acid sequence of SEQ ID NO: 8.
[0303] 9. The antibody of any one of paragraphs 1-8, wherein the antibody comprises (a) a heavy chain comprising the amino acid sequence of SEQ ID NO: 17 and (b) a light chain comprising the amino acid sequence of SEQ ID NO: 18.
[0304] 10. The antibody of any one of paragraphs 1-9, wherein the antibody binds Ara h 2 with a K_{D} of about 50 nM or less.
[0305] 11. The method of paragraph 10, wherein the K_{D} is measured by a surface plasmon resonance assay.
[0306] 12. The antibody of paragraph 11, wherein the antibody binds Ara h 2 with a K_{D} of between about 0.1 pM and about 40 nM.
[0307] 13. The antibody of paragraph 12, wherein the antibody binds Ara h 2 with a K_{D} of between about 120 pM and about 20 nM.
[0308] 14. The antibody of paragraph 13, wherein the antibody binds Ara h 2 with a K_{D} of between about 120 pM and about 10 nM.
[0309] 15. The antibody of any one of paragraphs 1-14, wherein the antibody is capable neutralizing Ara h 2
[0310] 16. An antibody that binds to the same epitope as the antibody of any one of paragraph 1-15.
[0311] 17. An antibody that competes for binding to Ara h 2 with, or cross-blocks or is cross-blocked by, the antibody of any one of paragraphs 1-16.
[0312] 18. The antibody of paragraph 16 or 17, wherein whether the antibody binds to the same epitope or competes for binding to Ara h 2 is determined by an epitope binning assay.
[0313] 19. The antibody of any one of paragraphs 1-18, wherein the antibody is monoclonal.
[0314] 20. The antibody of any one of paragraphs 1-19, wherein the antibody is humanized.
[0315] 21. The antibody of any one of paragraphs 1-20, wherein the antibody is an antibody fragment that binds Ara h 2.
[0316] 22. The antibody of paragraph 21, wherein the antibody fragment is selected from the group consisting of Fab, Fab′-SH, Fv, scFv, and (Fab′)₂ fragments.
[0317] 23. The antibody of any one of paragraphs 1-22, wherein the antibody is a full-length antibody.
[0318] 24. The antibody of paragraph 23, wherein the antibody is an IgG antibody.
[0319] 25. The antibody of paragraph 24, wherein the IgG antibody is an IgG1 antibody.
[0320] 26. The antibody of paragraph 25, wherein the IgG antibody is an IgG4 antibody.
[0321] 27. The antibody of paragraph 26, wherein the IgG4 antibody comprises an S228P mutation (EU numbering).
[0322] 28. The antibody of any one of paragraphs 1-27, wherein the antibody is a monospecific antibody.
[0323] 29. The antibody of any one of paragraphs 1-28, wherein the antibody is a multispecific antibody.
[0324] 30. The antibody of paragraph 29, wherein the antibody is a bispecific antibody.
[0325] 31. A polynucleotide encoding an isolated antibody of any one of paragraphs 1-30.
[0326] 32. A vector comprising the polynucleotide of paragraph 31.
[0327] 33. A host cell comprising the vector of paragraph 32.
[0328] 34. A method of producing the antibody of any one of paragraphs 1-33, the method comprising culturing a host cell that comprises the vector of paragraph 32 and recovering the antibody.
[0329] 35. The method of paragraph 34, wherein the host cell is prokaryotic.
[0330] 36. The method of paragraph 35, wherein the host cell is Escherichia coli.
[0331] 37. The method of paragraph 34, wherein the host cell is eukaryotic.
[0332] 38. The method of paragraph 37, wherein the host cell is a 293 cell, a CHO cell, a yeast cell, or a plant cell.
[0333] 39. A method for treating a patient who demonstrates a sensitivity to, or an allergic reaction against, a nut or a portion thereof or an extract thereof, or to Ara h 2 protein, or for treating at least one symptom or complication associated with a sensitivity to, or allergic reaction against a nut or a portion thereof or an extract thereof, or to Ara h 2, comprising administering an effective amount of one or more isolated antibodies or antigen-binding fragments thereof that bind specifically to Ara h 2, according to any of paragraphs 1-30.
[0334] 40. The method of paragraph 39, further comprising administering an effective amount of a second therapeutic agent useful for diminishing an allergic reaction an allergic reaction against, a nut or a portion thereof or an extract thereof, or to Ara h 2 protein.
[0335] 41. A method for detecting the presence of Ara h 2 neutralizing antibodies in a biological sample, comprising:
   [0336] (a) providing a sample from a subject;
   [0337] (b) contacting the sample with a mixture comprising:
      [0338] (i) the antibody of any one of paragraphs 1-30 and
      [0339] (ii) Ara h 2, or a fragment thereof; and
   [0340] (c) detecting the binding of antibodies present in the biological sample to Ara h 2, or a fragment thereof.
[0341] 42. The method of paragraph 41, where antibody binding is detected using tandem bio-layer interferometry.
[0342] 43. The method of paragraphs 41 or 42, where the antibody from step (b) is bound to a solid support.
[0343] 44. The method of paragraphs 41 or 42, where Ara h 2, or a fragment thereof, is bound to a solid support.
[0344] 45. The method of paragraph 41, where antibody binding is detected using an enzyme-linked immunosorbent assay.

### P6:

[0345] 1. An isolated antibody that binds to Ara h 2 (conglutin-7), or an antigen-binding fragment thereof, wherein the antibody comprises the following six complementarity determining regions (CDRs):
[0346] (a) an CDR-H1 comprising the amino acid sequence of (SEQ ID NO: 21);
[0347] (b) an CDR-H2 comprising the amino acid sequence of (SEQ ID NO: 22);
[0348] (c) an CDR-H3 comprising the amino acid sequence of (SEQ ID NO: 23);
[0349] (d) an CDR-L1 comprising the amino acid sequence of (SEQ ID NO: 24);
[0350] (e) an CDR-L2 comprising the amino acid sequence of (SEQ ID NO: 25); and
[0351] (f) an CDR-L3 comprising the amino acid sequence of (SEQ ID NO: 26).
[0352] 2. The antibody of paragraph 1, wherein the antibody comprises
[0353] (a) a heavy chain variable (VH) domain comprising an amino sequence having at least 90%, at least 95%, or at least 99% sequence identity to the amino acid sequence of SEQ ID NO: 27;
[0354] (b) a light chain variable (VL) domain comprising an amino acid sequence having at least 90%, at least 95%, or at least 99% identity to the amino acid sequence of SEQ ID NO: 28; or (c) a VH domain as in (a) and a VL domain as in (b).
[0355] 3. The antibody of paragraph 1 or 2, further comprising the following VH domain framework regions (FRs):
[0356] (a) an FR-H1 comprising the amino acid sequence of (SEQ ID NO: 29);
[0357] (b) an FR-H2 comprising the amino acid sequence of (SEQ ID NO: 30);
[0358] (c) an FR-H3 comprising the amino acid sequence of (SEQ ID NO: 31); and
[0359] (d) an FR-H4 comprising the amino acid sequence of (SEQ ID NO: 32).
[0360] 4. The antibody of any one of paragraphs 1-3, wherein the VH domain comprises the amino acid sequence of SEQ ID NO: 27.
[0361] 5. The antibody of any one of paragraphs 1-4, further comprising the following VL domain FRs:
[0362] (a) an FR-L1 comprising the amino acid sequence of (SEQ ID NO: 33);
[0363] (b) an FR-L2 comprising the amino acid sequence of (SEQ ID NO: 34);
[0364] (c) an FR-L3 comprising the amino acid sequence of (SEQ ID NO: 35); and
[0365] (d) an FR-L4 comprising the amino acid sequence of (SEQ ID NO: 36).
[0366] 6. The antibody of any one of paragraphs 1-5, wherein the VL domain comprises the amino acid sequence of SEQ ID NO: 28.
[0367] 7. An isolated antibody that binds to Ara h 2, or an antigen-binding fragment thereof, wherein the antibody comprises
[0368] (a) a VH domain comprising an amino acid sequence having at least 90%, at least 95%, or at least 99% sequence identity to the amino acid sequence of SEQ ID NO: 27 and
[0369] (b) a VL domain comprising an amino acid sequence having at least 90%, at least 95%, or at least 99% sequence identity to the amino acid sequence of SEQ ID NO: 28.
[0370] 8. The antibody of paragraph 7, wherein the antibody comprises a VH domain comprising the amino acid sequence of SEQ ID NO: 27 and a VL domain comprising the amino acid sequence of SEQ ID NO: 28.
[0371] 9. The antibody of any one of paragraphs 1-8, wherein the antibody comprises (a) a heavy chain comprising the amino acid sequence of SEQ ID NO: 37 and (b) a light chain comprising the amino acid sequence of SEQ ID NO: 38.
[0372] 10. The antibody of any one of paragraphs 1-9, wherein the antibody binds Ara h 2 with a KD of about 50 nM or less.
[0373] 11. The method of paragraph 10, wherein the KD is measured by a surface plasmon resonance assay.
[0374] 12. The antibody of paragraph 11, wherein the antibody binds Ara h 2 with a KD of between about 0.1 pM and about 40 nM.
[0375] 13. The antibody of paragraph 12, wherein the antibody binds Ara h 2 with a KD of between about 120 pM and about 20 nM.
[0376] 14. The antibody of paragraph 13, wherein the antibody binds Ara h 2 with a KD of between about 120 pM and about 10 nM.
[0377] 15. The antibody of any one of paragraphs 1-14, wherein the antibody is capable neutralizing Ara h 2
[0378] 16. An antibody that binds to the same epitope as the antibody of any one of paragraph 1-15.
[0379] 17. An antibody that competes for binding to Ara h 2 with, or cross-blocks or is cross-blocked by, the antibody of any one of paragraphs 1-16.
[0380] 18. The antibody of paragraph 16 or 17, wherein whether the antibody binds to the same epitope or competes for binding to Ara h 2 is determined by an epitope binning assay.
[0381] 19. The antibody of any one of paragraphs 1-18, wherein the antibody is monoclonal.
[0382] 20. The antibody of any one of paragraphs 1-19, wherein the antibody is humanized.
[0383] 21. The antibody of any one of paragraphs 1-20, wherein the antibody is an antibody fragment that binds Ara h 2.
[0384] 22. The antibody of paragraph 21, wherein the antibody fragment is selected from the group consisting of Fab, Fab′-SH, Fv, scFv, and (Fab′)2 fragments.
[0385] 23. The antibody of any one of paragraphs 1-22, wherein the antibody is a full-length antibody.
[0386] 24. The antibody of paragraph 23, wherein the antibody is an IgG antibody.
[0387] 25. The antibody of paragraph 24, wherein the IgG antibody is an IgG1 antibody.
[0388] 26. The antibody of paragraph 25, wherein the IgG antibody is an IgG4 antibody.
[0389] 27. The antibody of paragraph 26, wherein the IgG4 antibody comprises an S228P mutation (EU numbering).
[0390] 28. The antibody of any one of paragraphs 1-27, wherein the antibody is a monospecific antibody.
[0391] 29. The antibody of any one of paragraphs 1-28, wherein the antibody is a multispecific antibody.
[0392] 30. The antibody of paragraph 29, wherein the antibody is a bispecific antibody.
[0393] 31. A polynucleotide encoding an isolated antibody of any one of paragraphs 1-30.
[0394] 32. A vector comprising the polynucleotide of paragraph 31.
[0395] 33. A host cell comprising the vector of paragraph 32.
[0396] 34. A method of producing the antibody of any one of paragraphs 1-33, the method comprising culturing a host cell that comprises the vector of paragraph 32 and recovering the antibody.
[0397] 35. The method of paragraph 34, wherein the host cell is prokaryotic.
[0398] 36. The method of paragraph 35, wherein the host cell is Escherichia coli.
[0399] 37. The method of paragraph 34, wherein the host cell is eukaryotic.
[0400] 38. The method of paragraph 37, wherein the host cell is a 293 cell, a CHO cell, a yeast cell, or a plant cell.
[0401] 39. A method for treating a patient who demonstrates a sensitivity to, or an allergic reaction against, a nut or a portion thereof or an extract thereof, or to Ara h 2 protein, or for treating at least one symptom or complication associated with a sensitivity to, or allergic reaction against a nut or a portion thereof or an extract thereof, or to Ara h 2, comprising administering an effective amount of one or more isolated antibodies or antigen-binding fragments thereof that bind specifically to Ara h 2, according to any of paragraphs 1-30.
[0402] 40. The method of paragraph 39, further comprising administering an effective amount of a second therapeutic agent useful for diminishing an allergic reaction an allergic reaction against, a nut or a portion thereof or an extract thereof, or to Ara h 2 protein.
[0403] 41. A method for detecting the presence of Ara h 2 neutralizing antibodies in a biological sample, comprising:
[0404] (a) providing a sample from a subject;
[0405] (b) contacting the sample with a mixture comprising:
   [0406] (i) the antibody of any one of paragraphs 1-30 and
   [0407] (ii) Ara h 2, or a fragment thereof; and
[0408] (c) detecting the binding of antibodies present in the biological sample to Ara h 2, or a fragment thereof.
[0409] 42. The method of paragraph 41, where antibody binding is detected using tandem bio-layer interferometry.
[0410] 43. The method of paragraphs 41 or 42, where the antibody from step (b) is bound to a solid support.
[0411] 44. The method of paragraphs 41 or 42, where Ara h 2, or a fragment thereof, is bound to a solid support.
[0412] 45. The method of paragraph 41, where antibody binding is detected using an enzyme-linked immunosorbent assay.

### P7:

[0413] 1. An isolated antibody that binds to Ara h 2 (conglutin-7), or an antigen-binding fragment thereof, wherein the antibody comprises the following six complementarity determining regions (CDRs):
[0414] (a) an CDR-H1 comprising the amino acid sequence of (SEQ ID NO: 41);
[0415] (b) an CDR-H2 comprising the amino acid sequence of (SEQ ID NO: 42);
[0416] (c) an CDR-H3 comprising the amino acid sequence of (SEQ ID NO: 43);
[0417] (d) an CDR-L1 comprising the amino acid sequence of (SEQ ID NO: 44);
[0418] (e) an CDR-L2 comprising the amino acid sequence of (SEQ ID NO: 45); and
[0419] (f) an CDR-L3 comprising the amino acid sequence of (SEQ ID NO: 46).
[0420] 2. The antibody of paragraph 1, wherein the antibody comprises
[0421] (a) a heavy chain variable (VH) domain comprising an amino sequence having at least 90%, at least 95%, or at least 99% sequence identity to the amino acid sequence of SEQ ID NO: 47;
[0422] (b) a light chain variable (VL) domain comprising an amino acid sequence having at least 90%, at least 95%, or at least 99% identity to the amino acid sequence of SEQ ID NO: 48; or (c) a VH domain as in (a) and a VL domain as in (b).
[0423] 3. The antibody of paragraph 1 or 2, further comprising the following VH domain framework regions (FRs):
[0424] (a) an FR-H1 comprising the amino acid sequence of (SEQ ID NO: 49);
[0425] (b) an FR-H2 comprising the amino acid sequence of (SEQ ID NO: 50);
[0426] (c) an FR-H3 comprising the amino acid sequence of (SEQ ID NO: 51); and
[0427] (d) an FR-H4 comprising the amino acid sequence of (SEQ ID NO: 52).
[0428] 4. The antibody of any one of paragraphs 1-3, wherein the VH domain comprises the amino acid sequence of SEQ ID NO: 47.
[0429] 5. The antibody of any one of paragraphs 1-4, further comprising the following VL domain FRs:
[0430] (a) an FR-L1 comprising the amino acid sequence of (SEQ ID NO: 53);
[0431] (b) an FR-L2 comprising the amino acid sequence of (SEQ ID NO: 54);
[0432] (c) an FR-L3 comprising the amino acid sequence of (SEQ ID NO: 55); and
[0433] (d) an FR-L4 comprising the amino acid sequence of (SEQ ID NO: 56).
[0434] 6. The antibody of any one of paragraphs 1-5, wherein the VL domain comprises the amino acid sequence of SEQ ID NO: 48.
[0435] 7. An isolated antibody that binds to Ara h 2, or an antigen-binding fragment thereof, wherein the antibody comprises
[0436] (a) a VH domain comprising an amino acid sequence having at least 90%, at least 95%, or at least 99% sequence identity to the amino acid sequence of SEQ ID NO: 47 and
[0437] (b) a VL domain comprising an amino acid sequence having at least 90%, at least 95%, or at least 99% sequence identity to the amino acid sequence of SEQ ID NO: 48.
[0438] 8. The antibody of paragraph 7, wherein the antibody comprises a VH domain comprising the amino acid sequence of SEQ ID NO: 47 and a VL domain comprising the amino acid sequence of SEQ ID NO: 48.
[0439] 9. The antibody of any one of paragraphs 1-8, wherein the antibody comprises (a) a heavy chain comprising the amino acid sequence of SEQ ID NO: 57 and (b) a light chain comprising the amino acid sequence of SEQ ID NO: 58.
[0440] 10. The antibody of any one of paragraphs 1-9, wherein the antibody binds Ara h 2 with a KD of about 50 nM or less.
[0441] 11. The method of paragraph 10, wherein the KD is measured by a surface plasmon resonance assay.
[0442] 12. The antibody of paragraph 11, wherein the antibody binds Ara h 2 with a KD of between about 0.1 pM and about 40 nM.
[0443] 13. The antibody of paragraph 12, wherein the antibody binds Ara h 2 with a KD of between about 120 pM and about 20 nM.
[0444] 14. The antibody of paragraph 13, wherein the antibody binds Ara h 2 with a KD of between about 120 pM and about 10 nM.
[0445] 15. The antibody of any one of paragraphs 1-14, wherein the antibody is capable neutralizing Ara h 2
[0446] 16. An antibody that binds to the same epitope as the antibody of any one of paragraph 1-15.
[0447] 17. An antibody that competes for binding to Ara h 2 with, or cross-blocks or is cross-blocked by, the antibody of any one of paragraphs 1-16.
[0448] 18. The antibody of paragraph 16 or 17, wherein whether the antibody binds to the same epitope or competes for binding to Ara h 2 is determined by an epitope binning assay.
[0449] 19. The antibody of any one of paragraphs 1-18, wherein the antibody is monoclonal.
[0450] 20. The antibody of any one of paragraphs 1-19, wherein the antibody is humanized.
[0451] 21. The antibody of any one of paragraphs 1-20, wherein the antibody is an antibody fragment that binds Ara h 2.
[0452] 22. The antibody of paragraph 21, wherein the antibody fragment is selected from the group consisting of Fab, Fab′-SH, Fv, scFv, and (Fab′)2 fragments.
[0453] 23. The antibody of any one of paragraphs 1-22, wherein the antibody is a full-length antibody.
[0454] 24. The antibody of paragraph 23, wherein the antibody is an IgG antibody.
[0455] 25. The antibody of paragraph 24, wherein the IgG antibody is an IgG1 antibody.
[0456] 26. The antibody of paragraph 25, wherein the IgG antibody is an IgG4 antibody.
[0457] 27. The antibody of paragraph 26, wherein the IgG4 antibody comprises an S228P mutation (EU numbering).
[0458] 28. The antibody of any one of paragraphs 1-27, wherein the antibody is a monospecific antibody.
[0459] 29. The antibody of any one of paragraphs 1-28, wherein the antibody is a multispecific antibody.
[0460] 30. The antibody of paragraph 29, wherein the antibody is a bispecific antibody.
[0461] 31. A polynucleotide encoding an isolated antibody of any one of paragraphs 1-30.
[0462] 32. A vector comprising the polynucleotide of paragraph 31.
[0463] 33. A host cell comprising the vector of paragraph 32.
[0464] 34. A method of producing the antibody of any one of paragraphs 1-33, the method comprising culturing a host cell that comprises the vector of paragraph 32 and recovering the antibody.
[0465] 35. The method of paragraph 34, wherein the host cell is prokaryotic.
[0466] 36. The method of paragraph 35, wherein the host cell is Escherichia coli.
[0467] 37. The method of paragraph 34, wherein the host cell is eukaryotic.
[0468] 38. The method of paragraph 37, wherein the host cell is a 293 cell, a CHO cell, a yeast cell, or a plant cell.
[0469] 39. A method for treating a patient who demonstrates a sensitivity to, or an allergic reaction against, a nut or a portion thereof or an extract thereof, or to Ara h 2 protein, or for treating at least one symptom or complication associated with a sensitivity to, or allergic reaction against a nut or a portion thereof or an extract thereof, or to Ara h 2, comprising administering an effective amount of one or more isolated antibodies or antigen-binding fragments thereof that bind specifically to Ara h 2, according to any of paragraphs 1-30.
[0470] 40. The method of paragraph 39, further comprising administering an effective amount of a second therapeutic agent useful for diminishing an allergic reaction an allergic reaction against, a nut or a portion thereof or an extract thereof, or to Ara h 2 protein.
[0471] 41. A method for detecting the presence of Ara h 2 neutralizing antibodies in a biological sample, comprising:
[0472] (a) providing a sample from a subject;
[0473] (b) contacting the sample with a mixture comprising:
   [0474] (i) the antibody of any one of paragraphs 1-30 and
   [0475] (ii) Ara h 2, or a fragment thereof; and
[0476] (c) detecting the binding of antibodies present in the biological sample to Ara h 2, or a fragment thereof.
[0477] 42. The method of paragraph 41, where antibody binding is detected using tandem bio-layer interferometry.
[0478] 43. The method of paragraphs 41 or 42, where the antibody from step (b) is bound to a solid support.
[0479] 44. The method of paragraphs 41 or 42, where Ara h 2, or a fragment thereof, is bound to a solid support.
[0480] 45. The method of paragraph 41, where antibody binding is detected using an enzyme-linked immunosorbent assay.

### P8:

[0481] 1. An isolated antibody that binds to Ara h 2 (conglutin-7), or an antigen-binding fragment thereof, wherein the antibody comprises the following six complementarity determining regions (CDRs):
[0482] (a) an CDR-H1 comprising the amino acid sequence of (SEQ ID NO: 61);
[0483] (b) an CDR-H2 comprising the amino acid sequence of (SEQ ID NO: 62);
[0484] (c) an CDR-H3 comprising the amino acid sequence of (SEQ ID NO: 63);
[0485] (d) an CDR-L1 comprising the amino acid sequence of (SEQ ID NO: 64);
[0486] (e) an CDR-L2 comprising the amino acid sequence of (SEQ ID NO: 65); and
[0487] (f) an CDR-L3 comprising the amino acid sequence of (SEQ ID NO: 66).
[0488] 2. The antibody of paragraph 1, wherein the antibody comprises
[0489] (a) a heavy chain variable (VH) domain comprising an amino sequence having at least 90%, at least 95%, or at least 99% sequence identity to the amino acid sequence of SEQ ID NO: 67;
[0490] (b) a light chain variable (VL) domain comprising an amino acid sequence having at least 90%, at least 95%, or at least 99% identity to the amino acid sequence of SEQ ID NO: 68; or (c) a VH domain as in (a) and a VL domain as in (b).
[0491] 3. The antibody of paragraph 1 or 2, further comprising the following VH domain framework regions (FRs):
[0492] (a) an FR-H1 comprising the amino acid sequence of (SEQ ID NO: 69);
[0493] (b) an FR-H2 comprising the amino acid sequence of (SEQ ID NO: 70);
[0494] (c) an FR-H3 comprising the amino acid sequence of (SEQ ID NO: 71); and
[0495] (d) an FR-H4 comprising the amino acid sequence of (SEQ ID NO: 72).
[0496] 4. The antibody of any one of paragraphs 1-3, wherein the VH domain comprises the amino acid sequence of SEQ ID NO: 67.
[0497] 5. The antibody of any one of paragraphs 1-4, further comprising the following VL domain FRs:
[0498] (a) an FR-L1 comprising the amino acid sequence of (SEQ ID NO: 73);
[0499] (b) an FR-L2 comprising the amino acid sequence of (SEQ ID NO: 74);
[0500] (c) an FR-L3 comprising the amino acid sequence of (SEQ ID NO: 75); and
[0501] (d) an FR-L4 comprising the amino acid sequence of (SEQ ID NO: 76).
[0502] 6. The antibody of any one of paragraphs 1-5, wherein the VL domain comprises the amino acid sequence of SEQ ID NO: 68.
[0503] 7. An isolated antibody that binds to Ara h 2, or an antigen-binding fragment thereof, wherein the antibody comprises
[0504] (a) a VH domain comprising an amino acid sequence having at least 90%, at least 95%, or at least 99% sequence identity to the amino acid sequence of SEQ ID NO: 67 and
[0505] (b) a VL domain comprising an amino acid sequence having at least 90%, at least 95%, or at least 99% sequence identity to the amino acid sequence of SEQ ID NO: 68.
[0506] 8. The antibody of paragraph 7, wherein the antibody comprises a VH domain comprising the amino acid sequence of SEQ ID NO: 67 and a VL domain comprising the amino acid sequence of SEQ ID NO: 68.
[0507] 9. The antibody of any one of paragraphs 1-8, wherein the antibody comprises (a) a heavy chain comprising the amino acid sequence of SEQ ID NO: 77 and (b) a light chain comprising the amino acid sequence of SEQ ID NO: 78.
[0508] 10. The antibody of any one of paragraphs 1-9, wherein the antibody binds Ara h 2 with a KD of about 50 nM or less.
[0509] 11. The method of paragraph 10, wherein the KD is measured by a surface plasmon resonance assay.
[0510] 12. The antibody of paragraph 11, wherein the antibody binds Ara h 2 with a KD of between about 0.1 pM and about 40 nM.
[0511] 13. The antibody of paragraph 12, wherein the antibody binds Ara h 2 with a KD of between about 120 pM and about 20 nM.
[0512] 14. The antibody of paragraph 13, wherein the antibody binds Ara h 2 with a KD of between about 120 pM and about 10 nM.
[0513] 15. The antibody of any one of paragraphs 1-14, wherein the antibody is capable neutralizing Ara h 2
[0514] 16. An antibody that binds to the same epitope as the antibody of any one of paragraph 1-15.
[0515] 17. An antibody that competes for binding to Ara h 2 with, or cross-blocks or is cross-blocked by, the antibody of any one of paragraphs 1-16.
[0516] 18. The antibody of paragraph 16 or 17, wherein whether the antibody binds to the same epitope or competes for binding to Ara h 2 is determined by an epitope binning assay.
[0517] 19. The antibody of any one of paragraphs 1-18, wherein the antibody is monoclonal.
[0518] 20. The antibody of any one of paragraphs 1-19, wherein the antibody is humanized.
[0519] 21. The antibody of any one of paragraphs 1-20, wherein the antibody is an antibody fragment that binds Ara h 2.
[0520] 22. The antibody of paragraph 21, wherein the antibody fragment is selected from the group consisting of Fab, Fab′-SH, Fv, scFv, and (Fab′)2 fragments.
[0521] 23. The antibody of any one of paragraphs 1-22, wherein the antibody is a full-length antibody.
[0522] 24. The antibody of paragraph 23, wherein the antibody is an IgG antibody.
[0523] 25. The antibody of paragraph 24, wherein the IgG antibody is an IgG1 antibody.
[0524] 26. The antibody of paragraph 25, wherein the IgG antibody is an IgG4 antibody.
[0525] 27. The antibody of paragraph 26, wherein the IgG4 antibody comprises an S228P mutation (EU numbering).
[0526] 28. The antibody of any one of paragraphs 1-27, wherein the antibody is a monospecific antibody.
[0527] 29. The antibody of any one of paragraphs 1-28, wherein the antibody is a multispecific antibody.
[0528] 30. The antibody of paragraph 29, wherein the antibody is a bispecific antibody.
[0529] 31. A polynucleotide encoding an isolated antibody of any one of paragraphs 1-30.
[0530] 32. A vector comprising the polynucleotide of paragraph 31.
[0531] 33. A host cell comprising the vector of paragraph 32.
[0532] 34. A method of producing the antibody of any one of paragraphs 1-33, the method comprising culturing a host cell that comprises the vector of paragraph 32 and recovering the antibody.
[0533] 35. The method of paragraph 34, wherein the host cell is prokaryotic.
[0534] 36. The method of paragraph 35, wherein the host cell is Escherichia coli.
[0535] 37. The method of paragraph 34, wherein the host cell is eukaryotic.
[0536] 38. The method of paragraph 37, wherein the host cell is a 293 cell, a CHO cell, a yeast cell, or a plant cell.
[0537] 39. A method for treating a patient who demonstrates a sensitivity to, or an allergic reaction against, a nut or a portion thereof or an extract thereof, or to Ara h 2 protein, or for treating at least one symptom or complication associated with a sensitivity to, or allergic reaction against a nut or a portion thereof or an extract thereof, or to Ara h 2, comprising administering an effective amount of one or more isolated antibodies or antigen-binding fragments thereof that bind specifically to Ara h 2, according to any of paragraphs 1-30.
[0538] 40. The method of paragraph 39, further comprising administering an effective amount of a second therapeutic agent useful for diminishing an allergic reaction an allergic reaction against, a nut or a portion thereof or an extract thereof, or to Ara h 2 protein.
[0539] 41. A method for detecting the presence of Ara h 2 neutralizing antibodies in a biological sample, comprising:
[0540] (a) providing a sample from a subject;
[0541] (b) contacting the sample with a mixture comprising:
   [0542] (i) the antibody of any one of paragraphs 1-30 and
   [0543] (ii) Ara h 2, or a fragment thereof; and
[0544] (c) detecting the binding of antibodies present in the biological sample to Ara h 2, or a fragment thereof.
[0545] 42. The method of paragraph 41, where antibody binding is detected using tandem bio-layer interferometry.
[0546] 43. The method of paragraphs 41 or 42, where the antibody from step (b) is bound to a solid support.
[0547] 44. The method of paragraphs 41 or 42, where Ara h 2, or a fragment thereof, is bound to a solid support.
[0548] 45. The method of paragraph 41, where antibody binding is detected using an enzyme-linked immunosorbent assay.

### P10:

[0549] 1. An isolated antibody that binds to Ara h 2 (conglutin-7), or an antigen-binding fragment thereof, wherein the antibody comprises the following six complementarity determining regions (CDRs):
[0550] (a) an CDR-H1 comprising the amino acid sequence of (SEQ ID NO: 81);
[0551] (b) an CDR-H2 comprising the amino acid sequence of (SEQ ID NO: 82);
[0552] (c) an CDR-H3 comprising the amino acid sequence of (SEQ ID NO: 83);
[0553] (d) an CDR-L1 comprising the amino acid sequence of (SEQ ID NO: 84);
[0554] (e) an CDR-L2 comprising the amino acid sequence of (SEQ ID NO: 85); and
[0555] (f) an CDR-L3 comprising the amino acid sequence of (SEQ ID NO: 86).
[0556] 2. The antibody of paragraph 1, wherein the antibody comprises
[0557] (a) a heavy chain variable (VH) domain comprising an amino sequence having at least 90%, at least 95%, or at least 99% sequence identity to the amino acid sequence of SEQ ID NO: 87;
[0558] (b) a light chain variable (VL) domain comprising an amino acid sequence having at least 90%, at least 95%, or at least 99% identity to the amino acid sequence of SEQ ID NO: 88; or (c) a VH domain as in (a) and a VL domain as in (b).
[0559] 3. The antibody of paragraph 1 or 2, further comprising the following VH domain framework regions (FRs):
[0560] (a) an FR-H1 comprising the amino acid sequence of (SEQ ID NO: 89);
[0561] (b) an FR-H2 comprising the amino acid sequence of (SEQ ID NO: 90);
[0562] (c) an FR-H3 comprising the amino acid sequence of (SEQ ID NO: 91); and
[0563] (d) an FR-H4 comprising the amino acid sequence of (SEQ ID NO:92).
[0564] 4. The antibody of any one of paragraphs 1-3, wherein the VH domain comprises the amino acid sequence of SEQ ID NO: 87.
[0565] 5. The antibody of any one of paragraphs 1-4, further comprising the following VL domain FRs:
[0566] (a) an FR-L1 comprising the amino acid sequence of (SEQ ID NO: 93);
[0567] (b) an FR-L2 comprising the amino acid sequence of (SEQ ID NO: 94);
[0568] (c) an FR-L3 comprising the amino acid sequence of (SEQ ID NO: 95); and
[0569] (d) an FR-L4 comprising the amino acid sequence of (SEQ ID NO: 96).
[0570] 6. The antibody of any one of paragraphs 1-5, wherein the VL domain comprises the amino acid sequence of SEQ ID NO: 88.
[0571] 7. An isolated antibody that binds to Ara h 2, or an antigen-binding fragment thereof, wherein the antibody comprises
[0572] (a) a VH domain comprising an amino acid sequence having at least 90%, at least 95%, or at least 99% sequence identity to the amino acid sequence of SEQ ID NO: 87 and
[0573] (b) a VL domain comprising an amino acid sequence having at least 90%, at least 95%, or at least 99% sequence identity to the amino acid sequence of SEQ ID NO: 88.
[0574] 8. The antibody of paragraph 7, wherein the antibody comprises a VH domain comprising the amino acid sequence of SEQ ID NO: 87 and a VL domain comprising the amino acid sequence of SEQ ID NO: 88.
[0575] 9. The antibody of any one of paragraphs 1-8, wherein the antibody comprises (a) a heavy chain comprising the amino acid sequence of SEQ ID NO: 97 and (b) a light chain comprising the amino acid sequence of SEQ ID NO: 98.
[0576] 10. The antibody of any one of paragraphs 1-9, wherein the antibody binds Ara h 2 with a KD of about 50 nM or less.
[0577] 11. The method of paragraph 10, wherein the KD is measured by a surface plasmon resonance assay.
[0578] 12. The antibody of paragraph 11, wherein the antibody binds Ara h 2 with a KD of between about 0.1 pM and about 40 nM.
[0579] 13. The antibody of paragraph 12, wherein the antibody binds Ara h 2 with a KD of between about 120 pM and about 20 nM.
[0580] 14. The antibody of paragraph 13, wherein the antibody binds Ara h 2 with a KD of between about 120 pM and about 10 nM.
[0581] 15. The antibody of any one of paragraphs 1-14, wherein the antibody is capable neutralizing Ara h 2
[0582] 16. An antibody that binds to the same epitope as the antibody of any one of paragraph 1-15.
[0583] 17. An antibody that competes for binding to Ara h 2 with, or cross-blocks or is cross-blocked by, the antibody of any one of paragraphs 1-16.
[0584] 18. The antibody of paragraph 16 or 17, wherein whether the antibody binds to the same epitope or competes for binding to Ara h 2 is determined by an epitope binning assay.
[0585] 19. The antibody of any one of paragraphs 1-18, wherein the antibody is monoclonal.
[0586] 20. The antibody of any one of paragraphs 1-19, wherein the antibody is humanized.
[0587] 21. The antibody of any one of paragraphs 1-20, wherein the antibody is an antibody fragment that binds Ara h 2.
[0588] 22. The antibody of paragraph 21, wherein the antibody fragment is selected from the group consisting of Fab, Fab′-SH, Fv, scFv, and (Fab′)2 fragments.
[0589] 23. The antibody of any one of paragraphs 1-22, wherein the antibody is a full-length antibody.
[0590] 24. The antibody of paragraph 23, wherein the antibody is an IgG antibody.
[0591] 25. The antibody of paragraph 24, wherein the IgG antibody is an IgG1 antibody.
[0592] 26. The antibody of paragraph 25, wherein the IgG antibody is an IgG4 antibody.
[0593] 27. The antibody of paragraph 26, wherein the IgG4 antibody comprises an S228P mutation (EU numbering).
[0594] 28. The antibody of any one of paragraphs 1-27, wherein the antibody is a monospecific antibody.
[0595] 29. The antibody of any one of paragraphs 1-28, wherein the antibody is a multispecific antibody.
[0596] 30. The antibody of paragraph 29, wherein the antibody is a bispecific antibody.
[0597] 31. A polynucleotide encoding an isolated antibody of any one of paragraphs 1-30.
[0598] 32. A vector comprising the polynucleotide of paragraph 31.
[0599] 33. A host cell comprising the vector of paragraph 32.
[0600] 34. A method of producing the antibody of any one of paragraphs 1-33, the method comprising culturing a host cell that comprises the vector of paragraph 32 and recovering the antibody.
[0601] 35. The method of paragraph 34, wherein the host cell is prokaryotic.
[0602] 36. The method of paragraph 35, wherein the host cell is Escherichia coli.
[0603] 37. The method of paragraph 34, wherein the host cell is eukaryotic.
[0604] 38. The method of paragraph 37, wherein the host cell is a 293 cell, a CHO cell, a yeast cell, or a plant cell.
[0605] 39. A method for treating a patient who demonstrates a sensitivity to, or an allergic reaction against, a nut or a portion thereof or an extract thereof, or to Ara h 2 protein, or for treating at least one symptom or complication associated with a sensitivity to, or allergic reaction against a nut or a portion thereof or an extract thereof, or to Ara h 2, comprising administering an effective amount of one or more isolated antibodies or antigen-binding fragments thereof that bind specifically to Ara h 2, according to any of paragraphs 1-30.
[0606] 40. The method of paragraph 39, further comprising administering an effective amount of a second therapeutic agent useful for diminishing an allergic reaction an allergic reaction against, a nut or a portion thereof or an extract thereof, or to Ara h 2 protein.
[0607] 41. A method for detecting the presence of Ara h 2 neutralizing antibodies in a biological sample, comprising:
[0608] (a) providing a sample from a subject;
[0609] (b) contacting the sample with a mixture comprising:
   [0610] (i) the antibody of any one of paragraphs 1-30 and
   [0611] (ii) Ara h 2, or a fragment thereof; and
[0612] (c) detecting the binding of antibodies present in the biological sample to Ara h 2, or a fragment thereof.
[0613] 42. The method of paragraph 41, where antibody binding is detected using tandem bio-layer interferometry.
[0614] 43. The method of paragraphs 41 or 42, where the antibody from step (b) is bound to a solid support.
[0615] 44. The method of paragraphs 41 or 42, where Ara h 2, or a fragment thereof, is bound to a solid support.
[0616] 45. The method of paragraph 41, where antibody binding is detected using an enzyme-linked immunosorbent assay.

### P11:

[0617] 1. An isolated antibody that binds to Ara h 2 (conglutin-7), or an antigen-binding fragment thereof, wherein the antibody comprises the following six complementarity determining regions (CDRs):
[0618] (a) an CDR-H1 comprising the amino acid sequence of (SEQ ID NO: 101);
[0619] (b) an CDR-H2 comprising the amino acid sequence of (SEQ ID NO: 102);
[0620] (c) an CDR-H3 comprising the amino acid sequence of (SEQ ID NO: 103);
[0621] (d) an CDR-L1 comprising the amino acid sequence of (SEQ ID NO: 104);
[0622] (e) an CDR-L2 comprising the amino acid sequence of (SEQ ID NO: 105); and
[0623] (f) an CDR-L3 comprising the amino acid sequence of (SEQ ID NO: 106).
[0624] 2. The antibody of paragraph 1, wherein the antibody comprises
[0625] (a) a heavy chain variable (VH) domain comprising an amino sequence having at least 90%, at least 95%, or at least 99% sequence identity to the amino acid sequence of SEQ ID NO: 107;
[0626] (b) a light chain variable (VL) domain comprising an amino acid sequence having at least 90%, at least 95%, or at least 99% identity to the amino acid sequence of SEQ ID NO: 108; or (c) a VH domain as in (a) and a VL domain as in (b).
[0627] 3. The antibody of paragraph 1 or 2, further comprising the following VH domain framework regions (FRs):
[0628] (a) an FR-H1 comprising the amino acid sequence of (SEQ ID NO: 109);
[0629] (b) an FR-H2 comprising the amino acid sequence of (SEQ ID NO: 110);
[0630] (c) an FR-H3 comprising the amino acid sequence of (SEQ ID NO: 111); and
[0631] (d) an FR-H4 comprising the amino acid sequence of (SEQ ID NO: 112).
[0632] 4. The antibody of any one of paragraphs 1-3, wherein the VH domain comprises the amino acid sequence of SEQ ID NO: 107.
[0633] 5. The antibody of any one of paragraphs 1-4, further comprising the following VL domain FRs:
[0634] (a) an FR-L1 comprising the amino acid sequence of (SEQ ID NO: 113);
[0635] (b) an FR-L2 comprising the amino acid sequence of (SEQ ID NO: 114);
[0636] (c) an FR-L3 comprising the amino acid sequence of (SEQ ID NO: 115); and
[0637] (d) an FR-L4 comprising the amino acid sequence of (SEQ ID NO: 116).
[0638] 6. The antibody of any one of paragraphs 1-5, wherein the VL domain comprises the amino acid sequence of SEQ ID NO: 108.
[0639] 7. An isolated antibody that binds to Ara h 2, or an antigen-binding fragment thereof, wherein the antibody comprises
[0640] (a) a VH domain comprising an amino acid sequence having at least 90%, at least 95%, or at least 99% sequence identity to the amino acid sequence of SEQ ID NO: 107 and
[0641] (b) a VL domain comprising an amino acid sequence having at least 90%, at least 95%, or at least 99% sequence identity to the amino acid sequence of SEQ ID NO: 108.
[0642] 8. The antibody of paragraph 7, wherein the antibody comprises a VH domain comprising the amino acid sequence of SEQ ID NO: 107 and a VL domain comprising the amino acid sequence of SEQ ID NO: 108.
[0643] 9. The antibody of any one of paragraphs 1-8, wherein the antibody comprises (a) a heavy chain comprising the amino acid sequence of SEQ ID NO: 117 and (b) a light chain comprising the amino acid sequence of SEQ ID NO: 118.
[0644] 10. The antibody of any one of paragraphs 1-9, wherein the antibody binds Ara h 2 with a KD of about 50 nM or less.
[0645] 11. The method of paragraph 10, wherein the KD is measured by a surface plasmon resonance assay.
[0646] 12. The antibody of paragraph 11, wherein the antibody binds Ara h 2 with a KD of between about 0.1 pM and about 40 nM.
[0647] 13. The antibody of paragraph 12, wherein the antibody binds Ara h 2 with a KD of between about 120 pM and about 20 nM.
[0648] 14. The antibody of paragraph 13, wherein the antibody binds Ara h 2 with a KD of between about 120 pM and about 10 nM.
[0649] 15. The antibody of any one of paragraphs 1-14, wherein the antibody is capable neutralizing Ara h 2
[0650] 16. An antibody that binds to the same epitope as the antibody of any one of paragraph 1-15.
[0651] 17. An antibody that competes for binding to Ara h 2 with, or cross-blocks or is cross-blocked by, the antibody of any one of paragraphs 1-16.
[0652] 18. The antibody of paragraph 16 or 17, wherein whether the antibody binds to the same epitope or competes for binding to Ara h 2 is determined by an epitope binning assay.
[0653] 19. The antibody of any one of paragraphs 1-18, wherein the antibody is monoclonal.
[0654] 20. The antibody of any one of paragraphs 1-19, wherein the antibody is humanized.
[0655] 21. The antibody of any one of paragraphs 1-20, wherein the antibody is an antibody fragment that binds Ara h 2.
[0656] 22. The antibody of paragraph 21, wherein the antibody fragment is selected from the group consisting of Fab, Fab′-SH, Fv, scFv, and (Fab′)2 fragments.
[0657] 23. The antibody of any one of paragraphs 1-22, wherein the antibody is a full-length antibody.
[0658] 24. The antibody of paragraph 23, wherein the antibody is an IgG antibody.
[0659] 25. The antibody of paragraph 24, wherein the IgG antibody is an IgG1 antibody.
[0660] 26. The antibody of paragraph 25, wherein the IgG antibody is an IgG4 antibody.
[0661] 27. The antibody of paragraph 26, wherein the IgG4 antibody comprises an S228P mutation (EU numbering).
[0662] 28. The antibody of any one of paragraphs 1-27, wherein the antibody is a monospecific antibody.
[0663] 29. The antibody of any one of paragraphs 1-28, wherein the antibody is a multispecific antibody.
[0664] 30. The antibody of paragraph 29, wherein the antibody is a bispecific antibody.
[0665] 31. A polynucleotide encoding an isolated antibody of any one of paragraphs 1-30.
[0666] 32. A vector comprising the polynucleotide of paragraph 31.
[0667] 33. A host cell comprising the vector of paragraph 32.
[0668] 34. A method of producing the antibody of any one of paragraphs 1-33, the method comprising culturing a host cell that comprises the vector of paragraph 32 and recovering the antibody.
[0669] 35. The method of paragraph 34, wherein the host cell is prokaryotic.
[0670] 36. The method of paragraph 35, wherein the host cell is Escherichia coli.
[0671] 37. The method of paragraph 34, wherein the host cell is eukaryotic.
[0672] 38. The method of paragraph 37, wherein the host cell is a 293 cell, a CHO cell, a yeast cell, or a plant cell.
[0673] 39. A method for treating a patient who demonstrates a sensitivity to, or an allergic reaction against, a nut or a portion thereof or an extract thereof, or to Ara h 2 protein, or for treating at least one symptom or complication associated with a sensitivity to, or allergic reaction against a nut or a portion thereof or an extract thereof, or to Ara h 2, comprising administering an effective amount of one or more isolated antibodies or antigen-binding fragments thereof that bind specifically to Ara h 2, according to any of paragraphs 1-30.
[0674] 40. The method of paragraph 39, further comprising administering an effective amount of a second therapeutic agent useful for diminishing an allergic reaction an allergic reaction against, a nut or a portion thereof or an extract thereof, or to Ara h 2 protein.
[0675] 41. A method for detecting the presence of Ara h 2 neutralizing antibodies in a biological sample, comprising:
[0676] (a) providing a sample from a subject;
[0677] (b) contacting the sample with a mixture comprising:
   [0678] (i) the antibody of any one of paragraphs 1-30 and
   [0679] (ii) Ara h 2, or a fragment thereof; and
[0680] (c) detecting the binding of antibodies present in the biological sample to Ara h 2, or a fragment thereof.
[0681] 42. The method of paragraph 41, where antibody binding is detected using tandem bio-layer interferometry.
[0682] 43. The method of paragraphs 41 or 42, where the antibody from step (b) is bound to a solid support.
[0683] 44. The method of paragraphs 41 or 42, where Ara h 2, or a fragment thereof, is bound to a solid support.
[0684] 45. The method of paragraph 41, where antibody binding is detected using an enzyme-linked immunosorbent assay.

### P13:

[0685] 1. An isolated antibody that binds to Ara h 2 (conglutin-7), or an antigen-binding fragment thereof, wherein the antibody comprises the following six complementarity determining regions (CDRs):
[0686] (a) an CDR-H1 comprising the amino acid sequence of (SEQ ID NO: 121);
[0687] (b) an CDR-H2 comprising the amino acid sequence of (SEQ ID NO: 122);
[0688] (c) an CDR-H3 comprising the amino acid sequence of (SEQ ID NO: 123);
[0689] (d) an CDR-L1 comprising the amino acid sequence of (SEQ ID NO: 124);
[0690] (e) an CDR-L2 comprising the amino acid sequence of (SEQ ID NO: 125); and
[0691] (f) an CDR-L3 comprising the amino acid sequence of (SEQ ID NO: 126).
[0692] 2. The antibody of paragraph 1, wherein the antibody comprises
[0693] (a) a heavy chain variable (VH) domain comprising an amino sequence having at least 90%, at least 95%, or at least 99% sequence identity to the amino acid sequence of SEQ ID NO: 127;
[0694] (b) a light chain variable (VL) domain comprising an amino acid sequence having at least 90%, at least 95%, or at least 99% identity to the amino acid sequence of SEQ ID NO: 128; or (c) a VH domain as in (a) and a VL domain as in (b).
[0695] 3. The antibody of paragraph 1 or 2, further comprising the following VH domain framework regions (FRs):
[0696] (a) an FR-H1 comprising the amino acid sequence of (SEQ ID NO: 129);
[0697] (b) an FR-H2 comprising the amino acid sequence of (SEQ ID NO: 130);
[0698] (c) an FR-H3 comprising the amino acid sequence of (SEQ ID NO: 131); and
[0699] (d) an FR-H4 comprising the amino acid sequence of (SEQ ID NO: 132).
[0700] 4. The antibody of any one of paragraphs 1-3, wherein the VH domain comprises the amino acid sequence of SEQ ID NO: 127.
[0701] 5. The antibody of any one of paragraphs 1-4, further comprising the following VL domain FRs:
[0702] (a) an FR-L1 comprising the amino acid sequence of (SEQ ID NO: 133);
[0703] (b) an FR-L2 comprising the amino acid sequence of (SEQ ID NO: 134);
[0704] (c) an FR-L3 comprising the amino acid sequence of (SEQ ID NO: 135); and
[0705] (d) an FR-L4 comprising the amino acid sequence of (SEQ ID NO: 136).
[0706] 6. The antibody of any one of paragraphs 1-5, wherein the VL domain comprises the amino acid sequence of SEQ ID NO: 128.
[0707] 7. An isolated antibody that binds to Ara h 2, or an antigen-binding fragment thereof, wherein the antibody comprises
[0708] (a) a VH domain comprising an amino acid sequence having at least 90%, at least 95%, or at least 99% sequence identity to the amino acid sequence of SEQ ID NO: 127 and
[0709] (b) a VL domain comprising an amino acid sequence having at least 90%, at least 95%, or at least 99% sequence identity to the amino acid sequence of SEQ ID NO: 128.
[0710] 8. The antibody of paragraph 7, wherein the antibody comprises a VH domain comprising the amino acid sequence of SEQ ID NO: 127 and a VL domain comprising the amino acid sequence of SEQ ID NO: 128.
[0711] 9. The antibody of any one of paragraphs 1-8, wherein the antibody comprises (a) a heavy chain comprising the amino acid sequence of SEQ ID NO: 137 and (b) a light chain comprising the amino acid sequence of SEQ ID NO: 138.
[0712] 10. The antibody of any one of paragraphs 1-9, wherein the antibody binds Ara h 2 with a KD of about 50 nM or less.
[0713] 11. The method of paragraph 10, wherein the KD is measured by a surface plasmon resonance assay.
[0714] 12. The antibody of paragraph 11, wherein the antibody binds Ara h 2 with a KD of between about 0.1 pM and about 40 nM.
[0715] 13. The antibody of paragraph 12, wherein the antibody binds Ara h 2 with a KD of between about 120 pM and about 20 nM.
[0716] 14. The antibody of paragraph 13, wherein the antibody binds Ara h 2 with a KD of between about 120 pM and about 10 nM.
[0717] 15. The antibody of any one of paragraphs 1-14, wherein the antibody is capable neutralizing Ara h 2
[0718] 16. An antibody that binds to the same epitope as the antibody of any one of paragraph 1-15.
[0719] 17. An antibody that competes for binding to Ara h 2 with, or cross-blocks or is cross-blocked by, the antibody of any one of paragraphs 1-16.
[0720] 18. The antibody of paragraph 16 or 17, wherein whether the antibody binds to the same epitope or competes for binding to Ara h 2 is determined by an epitope binning assay.
[0721] 19. The antibody of any one of paragraphs 1-18, wherein the antibody is monoclonal.
[0722] 20. The antibody of any one of paragraphs 1-19, wherein the antibody is humanized.
[0723] 21. The antibody of any one of paragraphs 1-20, wherein the antibody is an antibody fragment that binds Ara h 2.
[0724] 22. The antibody of paragraph 21, wherein the antibody fragment is selected from the group consisting of Fab, Fab′-SH, Fv, scFv, and (Fab′)2 fragments.
[0725] 23. The antibody of any one of paragraphs 1-22, wherein the antibody is a full-length antibody.
[0726] 24. The antibody of paragraph 23, wherein the antibody is an IgG antibody.
[0727] 25. The antibody of paragraph 24, wherein the IgG antibody is an IgG1 antibody.
[0728] 26. The antibody of paragraph 25, wherein the IgG antibody is an IgG4 antibody.
[0729] 27. The antibody of paragraph 26, wherein the IgG4 antibody comprises an S228P mutation (EU numbering).
[0730] 28. The antibody of any one of paragraphs 1-27, wherein the antibody is a monospecific antibody.
[0731] 29. The antibody of any one of paragraphs 1-28, wherein the antibody is a multispecific antibody.
[0732] 30. The antibody of paragraph 29, wherein the antibody is a bispecific antibody.
[0733] 31. A polynucleotide encoding an isolated antibody of any one of paragraphs 1-30.
[0734] 32. A vector comprising the polynucleotide of paragraph 31.
[0735] 33. A host cell comprising the vector of paragraph 32.
[0736] 34. A method of producing the antibody of any one of paragraphs 1-33, the method comprising culturing a host cell that comprises the vector of paragraph 32 and recovering the antibody.
[0737] 35. The method of paragraph 34, wherein the host cell is prokaryotic.
[0738] 36. The method of paragraph 35, wherein the host cell is Escherichia coli.
[0739] 37. The method of paragraph 34, wherein the host cell is eukaryotic.
[0740] 38. The method of paragraph 37, wherein the host cell is a 293 cell, a CHO cell, a yeast cell, or a plant cell.
[0741] 39. A method for treating a patient who demonstrates a sensitivity to, or an allergic reaction against, a nut or a portion thereof or an extract thereof, or to Ara h 2 protein, or for treating at least one symptom or complication associated with a sensitivity to, or allergic reaction against a nut or a portion thereof or an extract thereof, or to Ara h 2, comprising administering an effective amount of one or more isolated antibodies or antigen-binding fragments thereof that bind specifically to Ara h 2, according to any of paragraphs 1-30.
[0742] 40. The method of paragraph 39, further comprising administering an effective amount of a second therapeutic agent useful for diminishing an allergic reaction an allergic reaction against, a nut or a portion thereof or an extract thereof, or to Ara h 2 protein.
[0743] 41. A method for detecting the presence of Ara h 2 neutralizing antibodies in a biological sample, comprising:
[0744] (a) providing a sample from a subject;
[0745] (b) contacting the sample with a mixture comprising:
   [0746] (i) the antibody of any one of paragraphs 1-30 and
   [0747] (ii) Ara h 2, or a fragment thereof; and
[0748] (c) detecting the binding of antibodies present in the biological sample to Ara h 2, or a fragment thereof.
[0749] 42. The method of paragraph 41, where antibody binding is detected using tandem bio-layer interferometry.
[0750] 43. The method of paragraphs 41 or 42, where the antibody from step (b) is bound to a solid support.
[0751] 44. The method of paragraphs 41 or 42, where Ara h 2, or a fragment thereof, is bound to a solid support.
[0752] 45. The method of paragraph 41, where antibody binding is detected using an enzyme-linked immunosorbent assay.

### P14:

[0753] 1. An isolated antibody that binds to Ara h 2 (conglutin-7), or an antigen-binding fragment thereof, wherein the antibody comprises the following six complementarity determining regions (CDRs):
[0754] (a) an CDR-H1 comprising the amino acid sequence of (SEQ ID NO: 141);
[0755] (b) an CDR-H2 comprising the amino acid sequence of (SEQ ID NO: 142);
[0756] (c) an CDR-H3 comprising the amino acid sequence of (SEQ ID NO: 143);
[0757] (d) an CDR-L1 comprising the amino acid sequence of (SEQ ID NO: 144);
[0758] (e) an CDR-L2 comprising the amino acid sequence of (SEQ ID NO: 145); and
[0759] (f) an CDR-L3 comprising the amino acid sequence of (SEQ ID NO: 146).
[0760] 2. The antibody of paragraph 1, wherein the antibody comprises
[0761] (a) a heavy chain variable (VH) domain comprising an amino sequence having at least 90%, at least 95%, or at least 99% sequence identity to the amino acid sequence of SEQ ID NO: 147;
[0762] (b) a light chain variable (VL) domain comprising an amino acid sequence having at least 90%, at least 95%, or at least 99% identity to the amino acid sequence of SEQ ID NO: 148; or (c) a VH domain as in (a) and a VL domain as in (b).
[0763] 3. The antibody of paragraph 1 or 2, further comprising the following VH domain framework regions (FRs):
[0764] (a) an FR-H1 comprising the amino acid sequence of (SEQ ID NO: 149);
[0765] (b) an FR-H2 comprising the amino acid sequence of (SEQ ID NO: 150);
[0766] (c) an FR-H3 comprising the amino acid sequence of (SEQ ID NO: 151); and
[0767] (d) an FR-H4 comprising the amino acid sequence of (SEQ ID NO: 152).
[0768] 4. The antibody of any one of paragraphs 1-3, wherein the VH domain comprises the amino acid sequence of SEQ ID NO: 147.
[0769] 5. The antibody of any one of paragraphs 1-4, further comprising the following VL domain FRs:
[0770] (a) an FR-L1 comprising the amino acid sequence of (SEQ ID NO: 153);
[0771] (b) an FR-L2 comprising the amino acid sequence of (SEQ ID NO: 154);
[0772] (c) an FR-L3 comprising the amino acid sequence of (SEQ ID NO: 155); and
[0773] (d) an FR-L4 comprising the amino acid sequence of (SEQ ID NO: 156).
[0774] 6. The antibody of any one of paragraphs 1-5, wherein the VL domain comprises the amino acid sequence of SEQ ID NO: 148.
[0775] 7. An isolated antibody that binds to Ara h 2, or an antigen-binding fragment thereof, wherein the antibody comprises
[0776] (a) a VH domain comprising an amino acid sequence having at least 90%, at least 95%, or at least 99% sequence identity to the amino acid sequence of SEQ ID NO: 147 and
[0777] (b) a VL domain comprising an amino acid sequence having at least 90%, at least 95%, or at least 99% sequence identity to the amino acid sequence of SEQ ID NO: 148.
[0778] 8. The antibody of paragraph 7, wherein the antibody comprises a VH domain comprising the amino acid sequence of SEQ ID NO: 147 and a VL domain comprising the amino acid sequence of SEQ ID NO: 148.
[0779] 9. The antibody of any one of paragraphs 1-8, wherein the antibody comprises (a) a heavy chain comprising the amino acid sequence of SEQ ID NO: 157 and (b) a light chain comprising the amino acid sequence of SEQ ID NO: 158.
[0780] 10. The antibody of any one of paragraphs 1-9, wherein the antibody binds Ara h 2 with a KD of about 50 nM or less.
[0781] 11. The method of paragraph 10, wherein the KD is measured by a surface plasmon resonance assay.
[0782] 12. The antibody of paragraph 11, wherein the antibody binds Ara h 2 with a KD of between about 0.1 pM and about 40 nM.
[0783] 13. The antibody of paragraph 12, wherein the antibody binds Ara h 2 with a KD of between about 120 pM and about 20 nM.
[0784] 14. The antibody of paragraph 13, wherein the antibody binds Ara h 2 with a KD of between about 120 pM and about 10 nM.
[0785] 15. The antibody of any one of paragraphs 1-14, wherein the antibody is capable neutralizing Ara h 2
[0786] 16. An antibody that binds to the same epitope as the antibody of any one of paragraph 1-15.
[0787] 17. An antibody that competes for binding to Ara h 2 with, or cross-blocks or is cross-blocked by, the antibody of any one of paragraphs 1-16.
[0788] 18. The antibody of paragraph 16 or 17, wherein whether the antibody binds to the same epitope or competes for binding to Ara h 2 is determined by an epitope binning assay.
[0789] 19. The antibody of any one of paragraphs 1-18, wherein the antibody is monoclonal.
[0790] 20. The antibody of any one of paragraphs 1-19, wherein the antibody is humanized.
[0791] 21. The antibody of any one of paragraphs 1-20, wherein the antibody is an antibody fragment that binds Ara h 2.
[0792] 22. The antibody of paragraph 21, wherein the antibody fragment is selected from the group consisting of Fab, Fab′-SH, Fv, scFv, and (Fab′)2 fragments.
[0793] 23. The antibody of any one of paragraphs 1-22, wherein the antibody is a full-length antibody.
[0794] 24. The antibody of paragraph 23, wherein the antibody is an IgG antibody.
[0795] 25. The antibody of paragraph 24, wherein the IgG antibody is an IgG1 antibody.
[0796] 26. The antibody of paragraph 25, wherein the IgG antibody is an IgG4 antibody.
[0797] 27. The antibody of paragraph 26, wherein the IgG4 antibody comprises an S228P mutation (EU numbering).
[0798] 28. The antibody of any one of paragraphs 1-27, wherein the antibody is a monospecific antibody.
[0799] 29. The antibody of any one of paragraphs 1-28, wherein the antibody is a multispecific antibody.
[0800] 30. The antibody of paragraph 29, wherein the antibody is a bispecific antibody.
[0801] 31. A polynucleotide encoding an isolated antibody of any one of paragraphs 1-30.
[0802] 32. A vector comprising the polynucleotide of paragraph 31.
[0803] 33. A host cell comprising the vector of paragraph 32.
[0804] 34. A method of producing the antibody of any one of paragraphs 1-33, the method comprising culturing a host cell that comprises the vector of paragraph 32 and recovering the antibody.
[0805] 35. The method of paragraph 34, wherein the host cell is prokaryotic.
[0806] 36. The method of paragraph 35, wherein the host cell is Escherichia coli.
[0807] 37. The method of paragraph 34, wherein the host cell is eukaryotic.
[0808] 38. The method of paragraph 37, wherein the host cell is a 293 cell, a CHO cell, a yeast cell, or a plant cell.
[0809] 39. A method for treating a patient who demonstrates a sensitivity to, or an allergic reaction against, a nut or a portion thereof or an extract thereof, or to Ara h 2 protein, or for treating at least one symptom or complication associated with a sensitivity to, or allergic reaction against a nut or a portion thereof or an extract thereof, or to Ara h 2, comprising administering an effective amount of one or more isolated antibodies or antigen-binding fragments thereof that bind specifically to Ara h 2, according to any of paragraphs 1-30.
[0810] 40. The method of paragraph 39, further comprising administering an effective amount of a second therapeutic agent useful for diminishing an allergic reaction an allergic reaction against, a nut or a portion thereof or an extract thereof, or to Ara h 2 protein.
[0811] 41. A method for detecting the presence of Ara h 2 neutralizing antibodies in a biological sample, comprising:
[0812] (a) providing a sample from a subject;
[0813] (b) contacting the sample with a mixture comprising:
   [0814] (i) the antibody of any one of paragraphs 1-30 and
   [0815] (ii) Ara h 2, or a fragment thereof; and
[0816] (c) detecting the binding of antibodies present in the biological sample to Ara h 2, or a fragment thereof.
[0817] 42. The method of paragraph 41, where antibody binding is detected using tandem bio-layer interferometry.
[0818] 43. The method of paragraphs 41 or 42, where the antibody from step (b) is bound to a solid support.
[0819] 44. The method of paragraphs 41 or 42, where Ara h 2, or a fragment thereof, is bound to a solid support.
[0820] 45. The method of paragraph 41, where antibody binding is detected using an enzyme-linked immunosorbent assay.

### P16:

[0821] 1. An isolated antibody that binds to Ara h 2 (conglutin-7), or an antigen-binding fragment thereof, wherein the antibody comprises the following six complementarity determining regions (CDRs):
[0822] (a) an CDR-H1 comprising the amino acid sequence of (SEQ ID NO: 161);
[0823] (b) an CDR-H2 comprising the amino acid sequence of (SEQ ID NO: 162);
[0824] (c) an CDR-H3 comprising the amino acid sequence of (SEQ ID NO: 163);
[0825] (d) an CDR-L1 comprising the amino acid sequence of (SEQ ID NO: 164);
[0826] (e) an CDR-L2 comprising the amino acid sequence of (SEQ ID NO: 165); and
[0827] (f) an CDR-L3 comprising the amino acid sequence of (SEQ ID NO: 166).
[0828] 2. The antibody of paragraph 1, wherein the antibody comprises
[0829] (a) a heavy chain variable (VH) domain comprising an amino sequence having at least 90%, at least 95%, or at least 99% sequence identity to the amino acid sequence of SEQ ID NO: 167;
[0830] (b) a light chain variable (VL) domain comprising an amino acid sequence having at least 90%, at least 95%, or at least 99% identity to the amino acid sequence of SEQ ID NO: 168; or (c) a VH domain as in (a) and a VL domain as in (b).
[0831] 3. The antibody of paragraph 1 or 2, further comprising the following VH domain framework regions (FRs):
[0832] (a) an FR-H1 comprising the amino acid sequence of (SEQ ID NO: 169);
[0833] (b) an FR-H2 comprising the amino acid sequence of (SEQ ID NO: 170);
[0834] (c) an FR-H3 comprising the amino acid sequence of (SEQ ID NO: 171); and
[0835] (d) an FR-H4 comprising the amino acid sequence of (SEQ ID NO: 172).
[0836] 4. The antibody of any one of paragraphs 1-3, wherein the VH domain comprises the amino acid sequence of SEQ ID NO: 167.
[0837] 5. The antibody of any one of paragraphs 1-4, further comprising the following VL domain FRs:
[0838] (a) an FR-L1 comprising the amino acid sequence of (SEQ ID NO: 173);
[0839] (b) an FR-L2 comprising the amino acid sequence of (SEQ ID NO: 174);
[0840] (c) an FR-L3 comprising the amino acid sequence of (SEQ ID NO: 175); and
[0841] (d) an FR-L4 comprising the amino acid sequence of (SEQ ID NO: 176).
[0842] 6. The antibody of any one of paragraphs 1-5, wherein the VL domain comprises the amino acid sequence of SEQ ID NO: 168.
[0843] 7. An isolated antibody that binds to Ara h 2, or an antigen-binding fragment thereof, wherein the antibody comprises
[0844] (a) a VH domain comprising an amino acid sequence having at least 90%, at least 95%, or at least 99% sequence identity to the amino acid sequence of SEQ ID NO: 167 and
[0845] (b) a VL domain comprising an amino acid sequence having at least 90%, at least 95%, or at least 99% sequence identity to the amino acid sequence of SEQ ID NO: 168.
[0846] 8. The antibody of paragraph 7, wherein the antibody comprises a VH domain comprising the amino acid sequence of SEQ ID NO: 167 and a VL domain comprising the amino acid sequence of SEQ ID NO: 168.
[0847] 9. The antibody of any one of paragraphs 1-8, wherein the antibody comprises (a) a heavy chain comprising the amino acid sequence of SEQ ID NO: 177 and (b) a light chain comprising the amino acid sequence of SEQ ID NO: 178.
[0848] 10. The antibody of any one of paragraphs 1-9, wherein the antibody binds Ara h 2 with a KD of about 50 nM or less.
[0849] 11. The method of paragraph 10, wherein the KD is measured by a surface plasmon resonance assay.
[0850] 12. The antibody of paragraph 11, wherein the antibody binds Ara h 2 with a KD of between about 0.1 pM and about 40 nM.
[0851] 13. The antibody of paragraph 12, wherein the antibody binds Ara h 2 with a KD of between about 120 pM and about 20 nM.
[0852] 14. The antibody of paragraph 13, wherein the antibody binds Ara h 2 with a KD of between about 120 pM and about 10 nM.
[0853] 15. The antibody of any one of paragraphs 1-14, wherein the antibody is capable neutralizing Ara h 2
[0854] 16. An antibody that binds to the same epitope as the antibody of any one of paragraph 1-15.
[0855] 17. An antibody that competes for binding to Ara h 2 with, or cross-blocks or is cross-blocked by, the antibody of any one of paragraphs 1-16.
[0856] 18. The antibody of paragraph 16 or 17, wherein whether the antibody binds to the same epitope or competes for binding to Ara h 2 is determined by an epitope binning assay.
[0857] 19. The antibody of any one of paragraphs 1-18, wherein the antibody is monoclonal.
[0858] 20. The antibody of any one of paragraphs 1-19, wherein the antibody is humanized.
[0859] 21. The antibody of any one of paragraphs 1-20, wherein the antibody is an antibody fragment that binds Ara h 2.
[0860] 22. The antibody of paragraph 21, wherein the antibody fragment is selected from the group consisting of Fab, Fab′-SH, Fv, scFv, and (Fab′)2 fragments.
[0861] 23. The antibody of any one of paragraphs 1-22, wherein the antibody is a full-length antibody.
[0862] 24. The antibody of paragraph 23, wherein the antibody is an IgG antibody.
[0863] 25. The antibody of paragraph 24, wherein the IgG antibody is an IgG1 antibody.
[0864] 26. The antibody of paragraph 25, wherein the IgG antibody is an IgG4 antibody.
[0865] 27. The antibody of paragraph 26, wherein the IgG4 antibody comprises an S228P mutation (EU numbering).
[0866] 28. The antibody of any one of paragraphs 1-27, wherein the antibody is a monospecific antibody.
[0867] 29. The antibody of any one of paragraphs 1-28, wherein the antibody is a multispecific antibody.
[0868] 30. The antibody of paragraph 29, wherein the antibody is a bispecific antibody.
[0869] 31. A polynucleotide encoding an isolated antibody of any one of paragraphs 1-30.
[0870] 32. A vector comprising the polynucleotide of paragraph 31.
[0871] 33. A host cell comprising the vector of paragraph 32.
[0872] 34. A method of producing the antibody of any one of paragraphs 1-33, the method comprising culturing a host cell that comprises the vector of paragraph 32 and recovering the antibody.
[0873] 35. The method of paragraph 34, wherein the host cell is prokaryotic.
[0874] 36. The method of paragraph 35, wherein the host cell is Escherichia coli.
[0875] 37. The method of paragraph 34, wherein the host cell is eukaryotic.
[0876] 38. The method of paragraph 37, wherein the host cell is a 293 cell, a CHO cell, a yeast cell, or a plant cell.
[0877] 39. A method for treating a patient who demonstrates a sensitivity to, or an allergic reaction against, a nut or a portion thereof or an extract thereof, or to Ara h 2 protein, or for treating at least one symptom or complication associated with a sensitivity to, or allergic reaction against a nut or a portion thereof or an extract thereof, or to Ara h 2, comprising administering an effective amount of one or more isolated antibodies or antigen-binding fragments thereof that bind specifically to Ara h 2, according to any of paragraphs 1-30.
[0878] 40. The method of paragraph 39, further comprising administering an effective amount of a second therapeutic agent useful for diminishing an allergic reaction an allergic reaction against, a nut or a portion thereof or an extract thereof, or to Ara h 2 protein.
[0879] 41. A method for detecting the presence of Ara h 2 neutralizing antibodies in a biological sample, comprising:
[0880] (a) providing a sample from a subject;
[0881] (b) contacting the sample with a mixture comprising:
   [0882] (i) the antibody of any one of paragraphs 1-30 and
   [0883] (ii) Ara h 2, or a fragment thereof; and
[0884] (c) detecting the binding of antibodies present in the biological sample to Ara h 2, or a fragment thereof.
[0885] 42. The method of paragraph 41, where antibody binding is detected using tandem bio-layer interferometry.
[0886] 43. The method of paragraphs 41 or 42, where the antibody from step (b) is bound to a solid support.
[0887] 44. The method of paragraphs 41 or 42, where Ara h 2, or a fragment thereof, is bound to a solid support.
[0888] 45. The method of paragraph 41, where antibody binding is detected using an enzyme-linked immunosorbent assay.

### P17:

[0889] 1. An isolated antibody that binds to Ara h 2 (conglutin-7), or an antigen-binding fragment thereof, wherein the antibody comprises the following six complementarity determining regions (CDRs):
[0890] (a) an CDR-H1 comprising the amino acid sequence of (SEQ ID NO: 181);
[0891] (b) an CDR-H2 comprising the amino acid sequence of (SEQ ID NO: 182);
[0892] (c) an CDR-H3 comprising the amino acid sequence of (SEQ ID NO: 183);
[0893] (d) an CDR-L1 comprising the amino acid sequence of (SEQ ID NO: 184);
[0894] (e) an CDR-L2 comprising the amino acid sequence of (SEQ ID NO: 185); and
[0895] (f) an CDR-L3 comprising the amino acid sequence of (SEQ ID NO: 186).
[0896] 2. The antibody of paragraph 1, wherein the antibody comprises
[0897] (a) a heavy chain variable (VH) domain comprising an amino sequence having at least 90%, at least 95%, or at least 99% sequence identity to the amino acid sequence of SEQ ID NO: 187;
[0898] (b) a light chain variable (VL) domain comprising an amino acid sequence having at least 90%, at least 95%, or at least 99% identity to the amino acid sequence of SEQ ID NO: 188; or (c) a VH domain as in (a) and a VL domain as in (b).
[0899] 3. The antibody of paragraph 1 or 2, further comprising the following VH domain framework regions (FRs):
[0900] (a) an FR-H1 comprising the amino acid sequence of (SEQ ID NO: 189);
[0901] (b) an FR-H2 comprising the amino acid sequence of (SEQ ID NO: 190);
[0902] (c) an FR-H3 comprising the amino acid sequence of (SEQ ID NO: 191); and
[0903] (d) an FR-H4 comprising the amino acid sequence of (SEQ ID NO: 192).
[0904] 4. The antibody of any one of paragraphs 1-3, wherein the VH domain comprises the amino acid sequence of SEQ ID NO: 187.
[0905] 5. The antibody of any one of paragraphs 1-4, further comprising the following VL domain FRs:
[0906] (a) an FR-L1 comprising the amino acid sequence of (SEQ ID NO: 193);
[0907] (b) an FR-L2 comprising the amino acid sequence of (SEQ ID NO: 194);
[0908] (c) an FR-L3 comprising the amino acid sequence of (SEQ ID NO: 195); and
[0909] (d) an FR-L4 comprising the amino acid sequence of (SEQ ID NO: 196).
[0910] 6. The antibody of any one of paragraphs 1-5, wherein the VL domain comprises the amino acid sequence of SEQ ID NO: 188.
[0911] 7. An isolated antibody that binds to Ara h 2, or an antigen-binding fragment thereof, wherein the antibody comprises
[0912] (a) a VH domain comprising an amino acid sequence having at least 90%, at least 95%, or at least 99% sequence identity to the amino acid sequence of SEQ ID NO: 187 and
[0913] (b) a VL domain comprising an amino acid sequence having at least 90%, at least 95%, or at least 99% sequence identity to the amino acid sequence of SEQ ID NO: 188.
[0914] 8. The antibody of paragraph 7, wherein the antibody comprises a VH domain comprising the amino acid sequence of SEQ ID NO: 187 and a VL domain comprising the amino acid sequence of SEQ ID NO: 188.
[0915] 9. The antibody of any one of paragraphs 1-8, wherein the antibody comprises (a) a heavy chain comprising the amino acid sequence of SEQ ID NO: 197 and (b) a light chain comprising the amino acid sequence of SEQ ID NO: 198.
[0916] 10. The antibody of any one of paragraphs 1-9, wherein the antibody binds Ara h 2 with a KD of about 50 nM or less.
[0917] 11. The method of paragraph 10, wherein the KD is measured by a surface plasmon resonance assay.
[0918] 12. The antibody of paragraph 11, wherein the antibody binds Ara h 2 with a KD of between about 0.1 pM and about 40 nM.
[0919] 13. The antibody of paragraph 12, wherein the antibody binds Ara h 2 with a KD of between about 120 pM and about 20 nM.
[0920] 14. The antibody of paragraph 13, wherein the antibody binds Ara h 2 with a KD of between about 120 pM and about 10 nM.
[0921] 15. The antibody of any one of paragraphs 1-14, wherein the antibody is capable neutralizing Ara h 2
[0922] 16. An antibody that binds to the same epitope as the antibody of any one of paragraph 1-15.
[0923] 17. An antibody that competes for binding to Ara h 2 with, or cross-blocks or is cross-blocked by, the antibody of any one of paragraphs 1-16.
[0924] 18. The antibody of paragraph 16 or 17, wherein whether the antibody binds to the same epitope or competes for binding to Ara h 2 is determined by an epitope binning assay.
[0925] 19. The antibody of any one of paragraphs 1-18, wherein the antibody is monoclonal.
[0926] 20. The antibody of any one of paragraphs 1-19, wherein the antibody is humanized.
[0927] 21. The antibody of any one of paragraphs 1-20, wherein the antibody is an antibody fragment that binds Ara h 2.
[0928] 22. The antibody of paragraph 21, wherein the antibody fragment is selected from the group consisting of Fab, Fab′-SH, Fv, scFv, and (Fab′)2 fragments.
[0929] 23. The antibody of any one of paragraphs 1-22, wherein the antibody is a full-length antibody.
[0930] 24. The antibody of paragraph 23, wherein the antibody is an IgG antibody.
[0931] 25. The antibody of paragraph 24, wherein the IgG antibody is an IgG1 antibody.
[0932] 26. The antibody of paragraph 25, wherein the IgG antibody is an IgG4 antibody.
[0933] 27. The antibody of paragraph 26, wherein the IgG4 antibody comprises an S228P mutation (EU numbering).
[0934] 28. The antibody of any one of paragraphs 1-27, wherein the antibody is a monospecific antibody.
[0935] 29. The antibody of any one of paragraphs 1-28, wherein the antibody is a multispecific antibody.
[0936] 30. The antibody of paragraph 29, wherein the antibody is a bispecific antibody.
[0937] 31. A polynucleotide encoding an isolated antibody of any one of paragraphs 1-30.
[0938] 32. A vector comprising the polynucleotide of paragraph 31.
[0939] 33. A host cell comprising the vector of paragraph 32.
[0940] 34. A method of producing the antibody of any one of paragraphs 1-33, the method comprising culturing a host cell that comprises the vector of paragraph 32 and recovering the antibody.
[0941] 35. The method of paragraph 34, wherein the host cell is prokaryotic.
[0942] 36. The method of paragraph 35, wherein the host cell is Escherichia coli.
[0943] 37. The method of paragraph 34, wherein the host cell is eukaryotic.
[0944] 38. The method of paragraph 37, wherein the host cell is a 293 cell, a CHO cell, a yeast cell, or a plant cell.
[0945] 39. A method for treating a patient who demonstrates a sensitivity to, or an allergic reaction against, a nut or a portion thereof or an extract thereof, or to Ara h 2 protein, or for treating at least one symptom or complication associated with a sensitivity to, or allergic reaction against a nut or a portion thereof or an extract thereof, or to Ara h 2, comprising administering an effective amount of one or more isolated antibodies or antigen-binding fragments thereof that bind specifically to Ara h 2, according to any of paragraphs 1-30.
[0946] 40. The method of paragraph 39, further comprising administering an effective amount of a second therapeutic agent useful for diminishing an allergic reaction an allergic reaction against, a nut or a portion thereof or an extract thereof, or to Ara h 2 protein.
[0947] 41. A method for detecting the presence of Ara h 2 neutralizing antibodies in a biological sample, comprising:
[0948] (a) providing a sample from a subject;
[0949] (b) contacting the sample with a mixture comprising:
   [0950] (i) the antibody of any one of paragraphs 1-30 and
   [0951] (ii) Ara h 2, or a fragment thereof; and
[0952] (c) detecting the binding of antibodies present in the biological sample to Ara h 2, or a fragment thereof.
[0953] 42. The method of paragraph 41, where antibody binding is detected using tandem bio-layer interferometry.
[0954] 43. The method of paragraphs 41 or 42, where the antibody from step (b) is bound to a solid support.
[0955] 44. The method of paragraphs 41 or 42, where Ara h 2, or a fragment thereof, is bound to a solid support.
[0956] 45. The method of paragraph 41, where antibody binding is detected using an enzyme-linked immunosorbent assay.

### P19:

[0957] 1. An isolated antibody that binds to Ara h 2 (conglutin-7), or an antigen-binding fragment thereof, wherein the antibody comprises the following six complementarity determining regions (CDRs):
[0958] (a) an CDR-H1 comprising the amino acid sequence of (SEQ ID NO: 201);
[0959] (b) an CDR-H2 comprising the amino acid sequence of (SEQ ID NO: 202);
[0960] (c) an CDR-H3 comprising the amino acid sequence of (SEQ ID NO: 203);
[0961] (d) an CDR-L1 comprising the amino acid sequence of (SEQ ID NO: 204);
[0962] (e) an CDR-L2 comprising the amino acid sequence of (SEQ ID NO: 205); and
[0963] (f) an CDR-L3 comprising the amino acid sequence of (SEQ ID NO: 206).
[0964] 2. The antibody of paragraph 1, wherein the antibody comprises
[0965] (a) a heavy chain variable (VH) domain comprising an amino sequence having at least 90%, at least 95%, or at least 99% sequence identity to the amino acid sequence of SEQ ID NO: 207;
[0966] (b) a light chain variable (VL) domain comprising an amino acid sequence having at least 90%, at least 95%, or at least 99% identity to the amino acid sequence of SEQ ID NO: 208; or (c) a VH domain as in (a) and a VL domain as in (b).
[0967] 3. The antibody of paragraph 1 or 2, further comprising the following VH domain framework regions (FRs):
[0968] (a) an FR-H1 comprising the amino acid sequence of (SEQ ID NO: 209);
[0969] (b) an FR-H2 comprising the amino acid sequence of (SEQ ID NO: 210);
[0970] (c) an FR-H3 comprising the amino acid sequence of (SEQ ID NO: 211); and
[0971] (d) an FR-H4 comprising the amino acid sequence of (SEQ ID NO: 212).
[0972] 4. The antibody of any one of paragraphs 1-3, wherein the VH domain comprises the amino acid sequence of SEQ ID NO: 207.
[0973] 5. The antibody of any one of paragraphs 1-4, further comprising the following VL domain FRs:
[0974] (a) an FR-L1 comprising the amino acid sequence of (SEQ ID NO: 213);
[0975] (b) an FR-L2 comprising the amino acid sequence of (SEQ ID NO: 214);
[0976] (c) an FR-L3 comprising the amino acid sequence of (SEQ ID NO: 215); and
[0977] (d) an FR-L4 comprising the amino acid sequence of (SEQ ID NO: 216).
[0978] 6. The antibody of any one of paragraphs 1-5, wherein the VL domain comprises the amino acid sequence of SEQ ID NO: 208.
[0979] 7. An isolated antibody that binds to Ara h 2, or an antigen-binding fragment thereof, wherein the antibody comprises
[0980] (a) a VH domain comprising an amino acid sequence having at least 90%, at least 95%, or at least 99% sequence identity to the amino acid sequence of SEQ ID NO: 207 and
[0981] (b) a VL domain comprising an amino acid sequence having at least 90%, at least 95%, or at least 99% sequence identity to the amino acid sequence of SEQ ID NO: 208.
[0982] 8. The antibody of paragraph 7, wherein the antibody comprises a VH domain comprising the amino acid sequence of SEQ ID NO: 207 and a VL domain comprising the amino acid sequence of SEQ ID NO: 208.
[0983] 9. The antibody of any one of paragraphs 1-8, wherein the antibody comprises (a) a heavy chain comprising the amino acid sequence of SEQ ID NO: 217 and (b) a light chain comprising the amino acid sequence of SEQ ID NO: 218.
[0984] 10. The antibody of any one of paragraphs 1-9, wherein the antibody binds Ara h 2 with a KD of about 50 nM or less.
[0985] 11. The method of paragraph 10, wherein the KD is measured by a surface plasmon resonance assay.
[0986] 12. The antibody of paragraph 11, wherein the antibody binds Ara h 2 with a KD of between about 0.1 pM and about 40 nM.
[0987] 13. The antibody of paragraph 12, wherein the antibody binds Ara h 2 with a KD of between about 120 pM and about 20 nM.
[0988] 14. The antibody of paragraph 13, wherein the antibody binds Ara h 2 with a KD of between about 120 pM and about 10 nM.
[0989] 15. The antibody of any one of paragraphs 1-14, wherein the antibody is capable neutralizing Ara h 2
[0990] 16. An antibody that binds to the same epitope as the antibody of any one of paragraph 1-15.
[0991] 17. An antibody that competes for binding to Ara h 2 with, or cross-blocks or is cross-blocked by, the antibody of any one of paragraphs 1-16.
[0992] 18. The antibody of paragraph 16 or 17, wherein whether the antibody binds to the same epitope or competes for binding to Ara h 2 is determined by an epitope binning assay.
[0993] 19. The antibody of any one of paragraphs 1-18, wherein the antibody is monoclonal.
[0994] 20. The antibody of any one of paragraphs 1-19, wherein the antibody is humanized.
[0995] 21. The antibody of any one of paragraphs 1-20, wherein the antibody is an antibody fragment that binds Ara h 2.
[0996] 22. The antibody of paragraph 21, wherein the antibody fragment is selected from the group consisting of Fab, Fab′-SH, Fv, scFv, and (Fab′)2 fragments.
[0997] 23. The antibody of any one of paragraphs 1-22, wherein the antibody is a full-length antibody.
[0998] 24. The antibody of paragraph 23, wherein the antibody is an IgG antibody.
[0999] 25. The antibody of paragraph 24, wherein the IgG antibody is an IgG1 antibody.
[1000] 26. The antibody of paragraph 25, wherein the IgG antibody is an IgG4 antibody.
[1001] 27. The antibody of paragraph 26, wherein the IgG4 antibody comprises an S228P mutation (EU numbering).
[1002] 28. The antibody of any one of paragraphs 1-27, wherein the antibody is a monospecific antibody.
[1003] 29. The antibody of any one of paragraphs 1-28, wherein the antibody is a multispecific antibody.
[1004] 30. The antibody of paragraph 29, wherein the antibody is a bispecific antibody.
[1005] 31. A polynucleotide encoding an isolated antibody of any one of paragraphs 1-30.
[1006] 32. A vector comprising the polynucleotide of paragraph 31.
[1007] 33. A host cell comprising the vector of paragraph 32.
[1008] 34. A method of producing the antibody of any one of paragraphs 1-33, the method comprising culturing a host cell that comprises the vector of paragraph 32 and recovering the antibody.
[1009] 35. The method of paragraph 34, wherein the host cell is prokaryotic.
[1010] 36. The method of paragraph 35, wherein the host cell is Escherichia coli.
[1011] 37. The method of paragraph 34, wherein the host cell is eukaryotic.
[1012] 38. The method of paragraph 37, wherein the host cell is a 293 cell, a CHO cell, a yeast cell, or a plant cell.
[1013] 39. A method for treating a patient who demonstrates a sensitivity to, or an allergic reaction against, a nut or a portion thereof or an extract thereof, or to Ara h 2 protein, or for treating at least one symptom or complication associated with a sensitivity to, or allergic reaction against a nut or a portion thereof or an extract thereof, or to Ara h 2, comprising administering an effective amount of one or more isolated antibodies or antigen-binding fragments thereof that bind specifically to Ara h 2, according to any of paragraphs 1-30.
[1014] 40. The method of paragraph 39, further comprising administering an effective amount of a second therapeutic agent useful for diminishing an allergic reaction an allergic reaction against, a nut or a portion thereof or an extract thereof, or to Ara h 2 protein.
[1015] 41. A method for detecting the presence of Ara h 2 neutralizing antibodies in a biological sample, comprising:
[1016] (a) providing a sample from a subject;
[1017] (b) contacting the sample with a mixture comprising:
   [1018] (i) the antibody of any one of paragraphs 1-30 and
   [1019] (ii) Ara h 2, or a fragment thereof; and
[1020] (c) detecting the binding of antibodies present in the biological sample to Ara h 2, or a fragment thereof.
[1021] 42. The method of paragraph 41, where antibody binding is detected using tandem bio-layer interferometry.
[1022] 43. The method of paragraphs 41 or 42, where the antibody from step (b) is bound to a solid support.
[1023] 44. The method of paragraphs 41 or 42, where Ara h 2, or a fragment thereof, is bound to a solid support.
[1024] 45. The method of paragraph 41, where antibody binding is detected using an enzyme-linked immunosorbent assay.

### P21:

[1025] 1. An isolated antibody that binds to Ara h 2 (conglutin-7), or an antigen-binding fragment thereof, wherein the antibody comprises the following six complementarity determining regions (CDRs):
[1026] (a) an CDR-H1 comprising the amino acid sequence of (SEQ ID NO: 221);
[1027] (b) an CDR-H2 comprising the amino acid sequence of (SEQ ID NO: 222);
[1028] (c) an CDR-H3 comprising the amino acid sequence of (SEQ ID NO: 223);
[1029] (d) an CDR-L1 comprising the amino acid sequence of (SEQ ID NO: 224);
[1030] (e) an CDR-L2 comprising the amino acid sequence of (SEQ ID NO: 225); and
[1031] (f) an CDR-L3 comprising the amino acid sequence of (SEQ ID NO: 226).
[1032] 2. The antibody of paragraph 1, wherein the antibody comprises
[1033] (a) a heavy chain variable (VH) domain comprising an amino sequence having at least 90%, at least 95%, or at least 99% sequence identity to the amino acid sequence of SEQ ID NO: 227;
[1034] (b) a light chain variable (VL) domain comprising an amino acid sequence having at least 90%, at least 95%, or at least 99% identity to the amino acid sequence of SEQ ID NO: 228; or (c) a VH domain as in (a) and a VL domain as in (b).
[1035] 3. The antibody of paragraph 1 or 2, further comprising the following VH domain framework regions (FRs):
[1036] (a) an FR-H1 comprising the amino acid sequence of (SEQ ID NO: 229);
[1037] (b) an FR-H2 comprising the amino acid sequence of (SEQ ID NO: 230);
[1038] (c) an FR-H3 comprising the amino acid sequence of (SEQ ID NO: 231); and
[1039] (d) an FR-H4 comprising the amino acid sequence of (SEQ ID NO: 232).
[1040] 4. The antibody of any one of paragraphs 1-3, wherein the VH domain comprises the amino acid sequence of SEQ ID NO: 227.
[1041] 5. The antibody of any one of paragraphs 1-4, further comprising the following VL domain FRs:
[1042] (a) an FR-L1 comprising the amino acid sequence of (SEQ ID NO: 233);
[1043] (b) an FR-L2 comprising the amino acid sequence of (SEQ ID NO: 234);
[1044] (c) an FR-L3 comprising the amino acid sequence of (SEQ ID NO: 235); and
[1045] (d) an FR-L4 comprising the amino acid sequence of (SEQ ID NO: 236).
[1046] 6. The antibody of any one of paragraphs 1-5, wherein the VL domain comprises the amino acid sequence of SEQ ID NO: 228.
[1047] 7. An isolated antibody that binds to Ara h 2, or an antigen-binding fragment thereof, wherein the antibody comprises
[1048] (a) a VH domain comprising an amino acid sequence having at least 90%, at least 95%, or at least 99% sequence identity to the amino acid sequence of SEQ ID NO: 227 and
[1049] (b) a VL domain comprising an amino acid sequence having at least 90%, at least 95%, or at least 99% sequence identity to the amino acid sequence of SEQ ID NO: 228.
[1050] 8. The antibody of paragraph 7, wherein the antibody comprises a VH domain comprising the amino acid sequence of SEQ ID NO: 227 and a VL domain comprising the amino acid sequence of SEQ ID NO: 228.
[1051] 9. The antibody of any one of paragraphs 1-8, wherein the antibody comprises (a) a heavy chain comprising the amino acid sequence of SEQ ID NO: 237 and (b) a light chain comprising the amino acid sequence of SEQ ID NO: 238.
[1052] 10. The antibody of any one of paragraphs 1-9, wherein the antibody binds Ara h 2 with a KD of about 50 nM or less.
[1053] 11. The method of paragraph 10, wherein the KD is measured by a surface plasmon resonance assay.
[1054] 12. The antibody of paragraph 11, wherein the antibody binds Ara h 2 with a KD of between about 0.1 pM and about 40 nM.
[1055] 13. The antibody of paragraph 12, wherein the antibody binds Ara h 2 with a KD of between about 120 pM and about 20 nM.
[1056] 14. The antibody of paragraph 13, wherein the antibody binds Ara h 2 with a KD of between about 120 pM and about 10 nM.
[1057] 15. The antibody of any one of paragraphs 1-14, wherein the antibody is capable neutralizing Ara h 2
[1058] 16. An antibody that binds to the same epitope as the antibody of any one of paragraph 1-15.
[1059] 17. An antibody that competes for binding to Ara h 2 with, or cross-blocks or is cross-blocked by, the antibody of any one of paragraphs 1-16.
[1060] 18. The antibody of paragraph 16 or 17, wherein whether the antibody binds to the same epitope or competes for binding to Ara h 2 is determined by an epitope binning assay.
[1061] 19. The antibody of any one of paragraphs 1-18, wherein the antibody is monoclonal.
[1062] 20. The antibody of any one of paragraphs 1-19, wherein the antibody is humanized.
[1063] 21. The antibody of any one of paragraphs 1-20, wherein the antibody is an antibody fragment that binds Ara h 2.
[1064] 22. The antibody of paragraph 21, wherein the antibody fragment is selected from the group consisting of Fab, Fab′-SH, Fv, scFv, and (Fab′)2 fragments.
[1065] 23. The antibody of any one of paragraphs 1-22, wherein the antibody is a full-length antibody.
[1066] 24. The antibody of paragraph 23, wherein the antibody is an IgG antibody.
[1067] 25. The antibody of paragraph 24, wherein the IgG antibody is an IgG1 antibody.
[1068] 26. The antibody of paragraph 25, wherein the IgG antibody is an IgG4 antibody.
[1069] 27. The antibody of paragraph 26, wherein the IgG4 antibody comprises an S228P mutation (EU numbering).
[1070] 28. The antibody of any one of paragraphs 1-27, wherein the antibody is a monospecific antibody.
[1071] 29. The antibody of any one of paragraphs 1-28, wherein the antibody is a multispecific antibody.
[1072] 30. The antibody of paragraph 29, wherein the antibody is a bispecific antibody.
[1073] 31. A polynucleotide encoding an isolated antibody of any one of paragraphs 1-30.
[1074] 32. A vector comprising the polynucleotide of paragraph 31.
[1075] 33. A host cell comprising the vector of paragraph 32.
[1076] 34. A method of producing the antibody of any one of paragraphs 1-33, the method comprising culturing a host cell that comprises the vector of paragraph 32 and recovering the antibody.
[1077] 35. The method of paragraph 34, wherein the host cell is prokaryotic.
[1078] 36. The method of paragraph 35, wherein the host cell is Escherichia coli.
[1079] 37. The method of paragraph 34, wherein the host cell is eukaryotic.
[1080] 38. The method of paragraph 37, wherein the host cell is a 293 cell, a CHO cell, a yeast cell, or a plant cell.
[1081] 39. A method for treating a patient who demonstrates a sensitivity to, or an allergic reaction against, a nut or a portion thereof or an extract thereof, or to Ara h 2 protein, or for treating at least one symptom or complication associated with a sensitivity to, or allergic reaction against a nut or a portion thereof or an extract thereof, or to Ara h 2, comprising administering an effective amount of one or more isolated antibodies or antigen-binding fragments thereof that bind specifically to Ara h 2, according to any of paragraphs 1-30.
[1082] 40. The method of paragraph 39, further comprising administering an effective amount of a second therapeutic agent useful for diminishing an allergic reaction an allergic reaction against, a nut or a portion thereof or an extract thereof, or to Ara h 2 protein.
[1083] 41. A method for detecting the presence of Ara h 2 neutralizing antibodies in a biological sample, comprising:
[1084] (a) providing a sample from a subject;
[1085] (b) contacting the sample with a mixture comprising:
   [1086] (i) the antibody of any one of paragraphs 1-30 and
   [1087] (ii) Ara h 2, or a fragment thereof; and
[1088] (c) detecting the binding of antibodies present in the biological sample to Ara h 2, or a fragment thereof.
[1089] 42. The method of paragraph 41, where antibody binding is detected using tandem bio-layer interferometry.
[1090] 43. The method of paragraphs 41 or 42, where the antibody from step (b) is bound to a solid support.
[1091] 44. The method of paragraphs 41 or 42, where Ara h 2, or a fragment thereof, is bound to a solid support.
[1092] 45. The method of paragraph 41, where antibody binding is detected using an enzyme-linked immunosorbent assay.

### P22:

[1093] 1. An isolated antibody that binds to Ara h 2 (conglutin-7), or an antigen-binding fragment thereof, wherein the antibody comprises the following six complementarity determining regions (CDRs):
[1094] (a) an CDR-H1 comprising the amino acid sequence of (SEQ ID NO: 241);
[1095] (b) an CDR-H2 comprising the amino acid sequence of (SEQ ID NO: 242);
[1096] (c) an CDR-H3 comprising the amino acid sequence of (SEQ ID NO: 243);
[1097] (d) an CDR-L1 comprising the amino acid sequence of (SEQ ID NO: 244);
[1098] (e) an CDR-L2 comprising the amino acid sequence of (SEQ ID NO: 245); and
[1099] (f) an CDR-L3 comprising the amino acid sequence of (SEQ ID NO: 246).
[1100] 2. The antibody of paragraph 1, wherein the antibody comprises
[1101] (a) a heavy chain variable (VH) domain comprising an amino sequence having at least 90%, at least 95%, or at least 99% sequence identity to the amino acid sequence of SEQ ID NO: 247;
[1102] (b) a light chain variable (VL) domain comprising an amino acid sequence having at least 90%, at least 95%, or at least 99% identity to the amino acid sequence of SEQ ID NO: 248; or (c) a VH domain as in (a) and a VL domain as in (b).
[1103] 3. The antibody of paragraph 1 or 2, further comprising the following VH domain framework regions (FRs):
[1104] (a) an FR-H1 comprising the amino acid sequence of (SEQ ID NO: 249);
[1105] (b) an FR-H2 comprising the amino acid sequence of (SEQ ID NO: 250);
[1106] (c) an FR-H3 comprising the amino acid sequence of (SEQ ID NO: 251); and
[1107] (d) an FR-H4 comprising the amino acid sequence of (SEQ ID NO: 252).
[1108] 4. The antibody of any one of paragraphs 1-3, wherein the VH domain comprises the amino acid sequence of SEQ ID NO: 247.
[1109] 5. The antibody of any one of paragraphs 1-4, further comprising the following VL domain FRs:
[1110] (a) an FR-L1 comprising the amino acid sequence of (SEQ ID NO: 253);
[1111] (b) an FR-L2 comprising the amino acid sequence of (SEQ ID NO: 254);
[1112] (c) an FR-L3 comprising the amino acid sequence of (SEQ ID NO: 255); and
[1113] (d) an FR-L4 comprising the amino acid sequence of (SEQ ID NO: 256).
[1114] 6. The antibody of any one of paragraphs 1-5, wherein the VL domain comprises the amino acid sequence of SEQ ID NO: 248.
[1115] 7. An isolated antibody that binds to Ara h 2, or an antigen-binding fragment thereof, wherein the antibody comprises
[1116] (a) a VH domain comprising an amino acid sequence having at least 90%, at least 95%, or at least 99% sequence identity to the amino acid sequence of SEQ ID NO: 247 and
[1117] (b) a VL domain comprising an amino acid sequence having at least 90%, at least 95%, or at least 99% sequence identity to the amino acid sequence of SEQ ID NO: 248.
[1118] 8. The antibody of paragraph 7, wherein the antibody comprises a VH domain comprising the amino acid sequence of SEQ ID NO: 247 and a VL domain comprising the amino acid sequence of SEQ ID NO: 248.
[1119] 9. The antibody of any one of paragraphs 1-8, wherein the antibody comprises (a) a heavy chain comprising the amino acid sequence of SEQ ID NO: 257 and (b) a light chain comprising the amino acid sequence of SEQ ID NO: 258.
[1120] 10. The antibody of any one of paragraphs 1-9, wherein the antibody binds Ara h 2 with a KD of about 50 nM or less.
[1121] 11. The method of paragraph 10, wherein the KD is measured by a surface plasmon resonance assay.
[1122] 12. The antibody of paragraph 11, wherein the antibody binds Ara h 2 with a KD of between about 0.1 pM and about 40 nM.
[1123] 13. The antibody of paragraph 12, wherein the antibody binds Ara h 2 with a KD of between about 120 pM and about 20 nM.
[1124] 14. The antibody of paragraph 13, wherein the antibody binds Ara h 2 with a KD of between about 120 pM and about 10 nM.
[1125] 15. The antibody of any one of paragraphs 1-14, wherein the antibody is capable neutralizing Ara h 2
[1126] 16. An antibody that binds to the same epitope as the antibody of any one of paragraph 1-15.
[1127] 17. An antibody that competes for binding to Ara h 2 with, or cross-blocks or is cross-blocked by, the antibody of any one of paragraphs 1-16.
[1128] 18. The antibody of paragraph 16 or 17, wherein whether the antibody binds to the same epitope or competes for binding to Ara h 2 is determined by an epitope binning assay.
[1129] 19. The antibody of any one of paragraphs 1-18, wherein the antibody is monoclonal.
[1130] 20. The antibody of any one of paragraphs 1-19, wherein the antibody is humanized.
[1131] 21. The antibody of any one of paragraphs 1-20, wherein the antibody is an antibody fragment that binds Ara h 2.
[1132] 22. The antibody of paragraph 21, wherein the antibody fragment is selected from the group consisting of Fab, Fab′-SH, Fv, scFv, and (Fab′)2 fragments.
[1133] 23. The antibody of any one of paragraphs 1-22, wherein the antibody is a full-length antibody.
[1134] 24. The antibody of paragraph 23, wherein the antibody is an IgG antibody.
[1135] 25. The antibody of paragraph 24, wherein the IgG antibody is an IgG1 antibody.
[1136] 26. The antibody of paragraph 25, wherein the IgG antibody is an IgG4 antibody.
[1137] 27. The antibody of paragraph 26, wherein the IgG4 antibody comprises an S228P mutation (EU numbering).
[1138] 28. The antibody of any one of paragraphs 1-27, wherein the antibody is a monospecific antibody.
[1139] 29. The antibody of any one of paragraphs 1-28, wherein the antibody is a multispecific antibody.
[1140] 30. The antibody of paragraph 29, wherein the antibody is a bispecific antibody.
[1141] 31. A polynucleotide encoding an isolated antibody of any one of paragraphs 1-30.
[1142] 32. A vector comprising the polynucleotide of paragraph 31.
[1143] 33. A host cell comprising the vector of paragraph 32.
[1144] 34. A method of producing the antibody of any one of paragraphs 1-33, the method comprising culturing a host cell that comprises the vector of paragraph 32 and recovering the antibody.
[1145] 35. The method of paragraph 34, wherein the host cell is prokaryotic.
[1146] 36. The method of paragraph 35, wherein the host cell is Escherichia coli.
[1147] 37. The method of paragraph 34, wherein the host cell is eukaryotic.
[1148] 38. The method of paragraph 37, wherein the host cell is a 293 cell, a CHO cell, a yeast cell, or a plant cell.
[1149] 39. A method for treating a patient who demonstrates a sensitivity to, or an allergic reaction against, a nut or a portion thereof or an extract thereof, or to Ara h 2 protein, or for treating at least one symptom or complication associated with a sensitivity to, or allergic reaction against a nut or a portion thereof or an extract thereof, or to Ara h 2, comprising administering an effective amount of one or more isolated antibodies or antigen-binding fragments thereof that bind specifically to Ara h 2, according to any of paragraphs 1-30.
[1150] 40. The method of paragraph 39, further comprising administering an effective amount of a second therapeutic agent useful for diminishing an allergic reaction an allergic reaction against, a nut or a portion thereof or an extract thereof, or to Ara h 2 protein.
[1151] 41. A method for detecting the presence of Ara h 2 neutralizing antibodies in a biological sample, comprising:
[1152] (a) providing a sample from a subject;
[1153] (b) contacting the sample with a mixture comprising:
   [1154] (i) the antibody of any one of paragraphs 1-30 and
   [1155] (ii) Ara h 2, or a fragment thereof; and
[1156] (c) detecting the binding of antibodies present in the biological sample to Ara h 2, or a fragment thereof.
[1157] 42. The method of paragraph 41, where antibody binding is detected using tandem bio-layer interferometry.
[1158] 43. The method of paragraphs 41 or 42, where the antibody from step (b) is bound to a solid support.
[1159] 44. The method of paragraphs 41 or 42, where Ara h 2, or a fragment thereof, is bound to a solid support.
[1160] 45. The method of paragraph 41, where antibody binding is detected using an enzyme-linked immunosorbent assay.

### P22:

[1161] 1. An isolated antibody that binds to Ara h 2 (conglutin-7), or an antigen-binding fragment thereof, wherein the antibody comprises the following six complementarity determining regions (CDRs):
[1162] (a) an CDR-H1 comprising the amino acid sequence of (SEQ ID NO: 261);
[1163] (b) an CDR-H2 comprising the amino acid sequence of (SEQ ID NO: 262);
[1164] (c) an CDR-H3 comprising the amino acid sequence of (SEQ ID NO: 263);
[1165] (d) an CDR-L1 comprising the amino acid sequence of (SEQ ID NO: 264);
[1166] (e) an CDR-L2 comprising the amino acid sequence of (SEQ ID NO: 265); and
[1167] (f) an CDR-L3 comprising the amino acid sequence of (SEQ ID NO: 266).
[1168] 2. The antibody of paragraph 1, wherein the antibody comprises
[1169] (a) a heavy chain variable (VH) domain comprising an amino sequence having at least 90%, at least 95%, or at least 99% sequence identity to the amino acid sequence of SEQ ID NO: 267;
[1170] (b) a light chain variable (VL) domain comprising an amino acid sequence having at least 90%, at least 95%, or at least 99% identity to the amino acid sequence of SEQ ID NO: 268; or (c) a VH domain as in (a) and a VL domain as in (b).
[1171] 3. The antibody of paragraph 1 or 2, further comprising the following VH domain framework regions (FRs):
[1172] (a) an FR-H1 comprising the amino acid sequence of (SEQ ID NO: 269);
[1173] (b) an FR-H2 comprising the amino acid sequence of (SEQ ID NO: 270);
[1174] (c) an FR-H3 comprising the amino acid sequence of (SEQ ID NO: 271); and
[1175] (d) an FR-H4 comprising the amino acid sequence of (SEQ ID NO: 272).
[1176] 4. The antibody of any one of paragraphs 1-3, wherein the VH domain comprises the amino acid sequence of SEQ ID NO: 267.
[1177] 5. The antibody of any one of paragraphs 1-4, further comprising the following VL domain FRs:
[1178] (a) an FR-L1 comprising the amino acid sequence of (SEQ ID NO: 273);
[1179] (b) an FR-L2 comprising the amino acid sequence of (SEQ ID NO: 274);
[1180] (c) an FR-L3 comprising the amino acid sequence of (SEQ ID NO: 275); and
[1181] (d) an FR-L4 comprising the amino acid sequence of (SEQ ID NO: 276).
[1182] 6. The antibody of any one of paragraphs 1-5, wherein the VL domain comprises the amino acid sequence of SEQ ID NO: 268.
[1183] 7. An isolated antibody that binds to Ara h 2, or an antigen-binding fragment thereof, wherein the antibody comprises
[1184] (a) a VH domain comprising an amino acid sequence having at least 90%, at least 95%, or at least 99% sequence identity to the amino acid sequence of SEQ ID NO: 267 and
[1185] (b) a VL domain comprising an amino acid sequence having at least 90%, at least 95%, or at least 99% sequence identity to the amino acid sequence of SEQ ID NO: 268.
[1186] 8. The antibody of paragraph 7, wherein the antibody comprises a VH domain comprising the amino acid sequence of SEQ ID NO: 267 and a VL domain comprising the amino acid sequence of SEQ ID NO: 268.
[1187] 9. The antibody of any one of paragraphs 1-8, wherein the antibody comprises (a) a heavy chain comprising the amino acid sequence of SEQ ID NO: 277 and (b) a light chain comprising the amino acid sequence of SEQ ID NO: 278.
[1188] 10. The antibody of any one of paragraphs 1-9, wherein the antibody binds Ara h 2 with a KD of about 50 nM or less.
[1189] 11. The method of paragraph 10, wherein the KD is measured by a surface plasmon resonance assay.
[1190] 12. The antibody of paragraph 11, wherein the antibody binds Ara h 2 with a KD of between about 0.1 pM and about 40 nM.
[1191] 13. The antibody of paragraph 12, wherein the antibody binds Ara h 2 with a KD of between about 120 pM and about 20 nM.
[1192] 14. The antibody of paragraph 13, wherein the antibody binds Ara h 2 with a KD of between about 120 pM and about 10 nM.
[1193] 15. The antibody of any one of paragraphs 1-14, wherein the antibody is capable neutralizing Ara h 2
[1194] 16. An antibody that binds to the same epitope as the antibody of any one of paragraph 1-15.
[1195] 17. An antibody that competes for binding to Ara h 2 with, or cross-blocks or is cross-blocked by, the antibody of any one of paragraphs 1-16.
[1196] 18. The antibody of paragraph 16 or 17, wherein whether the antibody binds to the same epitope or competes for binding to Ara h 2 is determined by an epitope binning assay.
[1197] 19. The antibody of any one of paragraphs 1-18, wherein the antibody is monoclonal.
[1198] 20. The antibody of any one of paragraphs 1-19, wherein the antibody is humanized.
[1199] 21. The antibody of any one of paragraphs 1-20, wherein the antibody is an antibody fragment that binds Ara h 2.
[1200] 22. The antibody of paragraph 21, wherein the antibody fragment is selected from the group consisting of Fab, Fab′-SH, Fv, scFv, and (Fab′)2 fragments.
[1201] 23. The antibody of any one of paragraphs 1-22, wherein the antibody is a full-length antibody.
[1202] 24. The antibody of paragraph 23, wherein the antibody is an IgG antibody.
[1203] 25. The antibody of paragraph 24, wherein the IgG antibody is an IgG1 antibody.
[1204] 26. The antibody of paragraph 25, wherein the IgG antibody is an IgG4 antibody.
[1205] 27. The antibody of paragraph 26, wherein the IgG4 antibody comprises an S228P mutation (EU numbering).
[1206] 28. The antibody of any one of paragraphs 1-27, wherein the antibody is a monospecific antibody.
[1207] 29. The antibody of any one of paragraphs 1-28, wherein the antibody is a multispecific antibody.
[1208] 30. The antibody of paragraph 29, wherein the antibody is a bispecific antibody.
[1209] 31. A polynucleotide encoding an isolated antibody of any one of paragraphs 1-30.
[1210] 32. A vector comprising the polynucleotide of paragraph 31.
[1211] 33. A host cell comprising the vector of paragraph 32.
[1212] 34. A method of producing the antibody of any one of paragraphs 1-33, the method comprising culturing a host cell that comprises the vector of paragraph 32 and recovering the antibody.
[1213] 35. The method of paragraph 34, wherein the host cell is prokaryotic.
[1214] 36. The method of paragraph 35, wherein the host cell is Escherichia coli.
[1215] 37. The method of paragraph 34, wherein the host cell is eukaryotic.
[1216] 38. The method of paragraph 37, wherein the host cell is a 293 cell, a CHO cell, a yeast cell, or a plant cell.
[1217] 39. A method for treating a patient who demonstrates a sensitivity to, or an allergic reaction against, a nut or a portion thereof or an extract thereof, or to Ara h 2 protein, or for treating at least one symptom or complication associated with a sensitivity to, or allergic reaction against a nut or a portion thereof or an extract thereof, or to Ara h 2, comprising administering an effective amount of one or more isolated antibodies or antigen-binding fragments thereof that bind specifically to Ara h 2, according to any of paragraphs 1-30.
[1218] 40. The method of paragraph 39, further comprising administering an effective amount of a second therapeutic agent useful for diminishing an allergic reaction an allergic reaction against, a nut or a portion thereof or an extract thereof, or to Ara h 2 protein.
[1219] 41. A method for detecting the presence of Ara h 2 neutralizing antibodies in a biological sample, comprising:
[1220] (a) providing a sample from a subject;
[1221] (b) contacting the sample with a mixture comprising:
   [1222] (i) the antibody of any one of paragraphs 1-30 and
   [1223] (ii) Ara h 2, or a fragment thereof; and
[1224] (c) detecting the binding of antibodies present in the biological sample to Ara h 2, or a fragment thereof.
[1225] 42. The method of paragraph 41, where antibody binding is detected using tandem bio-layer interferometry.
[1226] 43. The method of paragraphs 41 or 42, where the antibody from step (b) is bound to a solid support.
[1227] 44. The method of paragraphs 41 or 42, where Ara h 2, or a fragment thereof, is bound to a solid support.
[1228] 45. The method of paragraph 41, where antibody binding is detected using an enzyme-linked immunosorbent assay.

### P30:

[1229] 1. An isolated antibody that binds to Ara h 2 (conglutin-7), or an antigen-binding fragment thereof, wherein the antibody comprises the following six complementarity determining regions (CDRs):
[1230] (a) an CDR-H1 comprising the amino acid sequence of (SEQ ID NO: 281);
[1231] (b) an CDR-H2 comprising the amino acid sequence of (SEQ ID NO: 282);
[1232] (c) an CDR-H3 comprising the amino acid sequence of (SEQ ID NO: 283);
[1233] (d) an CDR-L1 comprising the amino acid sequence of (SEQ ID NO: 284);
[1234] (e) an CDR-L2 comprising the amino acid sequence of (SEQ ID NO: 285); and
[1235] (f) an CDR-L3 comprising the amino acid sequence of (SEQ ID NO: 286).
[1236] 2. The antibody of paragraph 1, wherein the antibody comprises
[1237] (a) a heavy chain variable (VH) domain comprising an amino sequence having at least 90%, at least 95%, or at least 99% sequence identity to the amino acid sequence of SEQ ID NO: 287;
[1238] (b) a light chain variable (VL) domain comprising an amino acid sequence having at least 90%, at least 95%, or at least 99% identity to the amino acid sequence of SEQ ID NO: 288; or (c) a VH domain as in (a) and a VL domain as in (b).
[1239] 3. The antibody of paragraph 1 or 2, further comprising the following VH domain framework regions (FRs):
[1240] (a) an FR-H1 comprising the amino acid sequence of (SEQ ID NO: 289);
[1241] (b) an FR-H2 comprising the amino acid sequence of (SEQ ID NO: 290);
[1242] (c) an FR-H3 comprising the amino acid sequence of (SEQ ID NO: 291); and
[1243] (d) an FR-H4 comprising the amino acid sequence of (SEQ ID NO: 292).
[1244] 4. The antibody of any one of paragraphs 1-3, wherein the VH domain comprises the amino acid sequence of SEQ ID NO: 287.
[1245] 5. The antibody of any one of paragraphs 1-4, further comprising the following VL domain FRs:
[1246] (a) an FR-L1 comprising the amino acid sequence of (SEQ ID NO: 293);
[1247] (b) an FR-L2 comprising the amino acid sequence of (SEQ ID NO: 294);
[1248] (c) an FR-L3 comprising the amino acid sequence of (SEQ ID NO: 295); and
[1249] (d) an FR-L4 comprising the amino acid sequence of (SEQ ID NO: 296).
[1250] 6. The antibody of any one of paragraphs 1-5, wherein the VL domain comprises the amino acid sequence of SEQ ID NO: 288.
[1251] 7. An isolated antibody that binds to Ara h 2, or an antigen-binding fragment thereof, wherein the antibody comprises
[1252] (a) a VH domain comprising an amino acid sequence having at least 90%, at least 95%, or at least 99% sequence identity to the amino acid sequence of SEQ ID NO: 287 and
[1253] (b) a VL domain comprising an amino acid sequence having at least 90%, at least 95%, or at least 99% sequence identity to the amino acid sequence of SEQ ID NO: 288.
[1254] 8. The antibody of paragraph 7, wherein the antibody comprises a VH domain comprising the amino acid sequence of SEQ ID NO: 287 and a VL domain comprising the amino acid sequence of SEQ ID NO: 288.
[1255] 9. The antibody of any one of paragraphs 1-8, wherein the antibody comprises (a) a heavy chain comprising the amino acid sequence of SEQ ID NO: 297 and (b) a light chain comprising the amino acid sequence of SEQ ID NO: 298.
[1256] 10. The antibody of any one of paragraphs 1-9, wherein the antibody binds Ara h 2 with a KD of about 50 nM or less.
[1257] 11. The method of paragraph 10, wherein the KD is measured by a surface plasmon resonance assay.
[1258] 12. The antibody of paragraph 11, wherein the antibody binds Ara h 2 with a KD of between about 0.1 pM and about 40 nM.
[1259] 13. The antibody of paragraph 12, wherein the antibody binds Ara h 2 with a KD of between about 120 pM and about 20 nM.
[1260] 14. The antibody of paragraph 13, wherein the antibody binds Ara h 2 with a KD of between about 120 pM and about 10 nM.
[1261] 15. The antibody of any one of paragraphs 1-14, wherein the antibody is capable neutralizing Ara h 2
[1262] 16. An antibody that binds to the same epitope as the antibody of any one of paragraph 1-15.
[1263] 17. An antibody that competes for binding to Ara h 2 with, or cross-blocks or is cross-blocked by, the antibody of any one of paragraphs 1-16.
[1264] 18. The antibody of paragraph 16 or 17, wherein whether the antibody binds to the same epitope or competes for binding to Ara h 2 is determined by an epitope binning assay.
[1265] 19. The antibody of any one of paragraphs 1-18, wherein the antibody is monoclonal.
[1266] 20. The antibody of any one of paragraphs 1-19, wherein the antibody is humanized.
[1267] 21. The antibody of any one of paragraphs 1-20, wherein the antibody is an antibody fragment that binds Ara h 2.
[1268] 22. The antibody of paragraph 21, wherein the antibody fragment is selected from the group consisting of Fab, Fab′-SH, Fv, scFv, and (Fab′)2 fragments.
[1269] 23. The antibody of any one of paragraphs 1-22, wherein the antibody is a full-length antibody.
[1270] 24. The antibody of paragraph 23, wherein the antibody is an IgG antibody.
[1271] 25. The antibody of paragraph 24, wherein the IgG antibody is an IgG1 antibody.
[1272] 26. The antibody of paragraph 25, wherein the IgG antibody is an IgG4 antibody.
[1273] 27. The antibody of paragraph 26, wherein the IgG4 antibody comprises an S228P mutation (EU numbering).
[1274] 28. The antibody of any one of paragraphs 1-27, wherein the antibody is a monospecific antibody.
[1275] 29. The antibody of any one of paragraphs 1-28, wherein the antibody is a multispecific antibody.
[1276] 30. The antibody of paragraph 29, wherein the antibody is a bispecific antibody.
[1277] 31. A polynucleotide encoding an isolated antibody of any one of paragraphs 1-30.
[1278] 32. A vector comprising the polynucleotide of paragraph 31.
[1279] 33. A host cell comprising the vector of paragraph 32.
[1280] 34. A method of producing the antibody of any one of paragraphs 1-33, the method comprising culturing a host cell that comprises the vector of paragraph 32 and recovering the antibody.
[1281] 35. The method of paragraph 34, wherein the host cell is prokaryotic.
[1282] 36. The method of paragraph 35, wherein the host cell is Escherichia coli.
[1283] 37. The method of paragraph 34, wherein the host cell is eukaryotic.
[1284] 38. The method of paragraph 37, wherein the host cell is a 293 cell, a CHO cell, a yeast cell, or a plant cell.
[1285] 39. A method for treating a patient who demonstrates a sensitivity to, or an allergic reaction against, a nut or a portion thereof or an extract thereof, or to Ara h 2 protein, or for treating at least one symptom or complication associated with a sensitivity to, or allergic reaction against a nut or a portion thereof or an extract thereof, or to Ara h 2, comprising administering an effective amount of one or more isolated antibodies or antigen-binding fragments thereof that bind specifically to Ara h 2, according to any of paragraphs 1-30.
[1286] 40. The method of paragraph 39, further comprising administering an effective amount of a second therapeutic agent useful for diminishing an allergic reaction an allergic reaction against, a nut or a portion thereof or an extract thereof, or to Ara h 2 protein.
[1287] 41. A method for detecting the presence of Ara h 2 neutralizing antibodies in a biological sample, comprising:
[1288] (a) providing a sample from a subject;
[1289] (b) contacting the sample with a mixture comprising:
   [1290] (i) the antibody of any one of paragraphs 1-30 and
   [1291] (ii) Ara h 2, or a fragment thereof; and
[1292] (c) detecting the binding of antibodies present in the biological sample to Ara h 2, or a fragment thereof.
[1293] 42. The method of paragraph 41, where antibody binding is detected using tandem bio-layer interferometry.
[1294] 43. The method of paragraphs 41 or 42, where the antibody from step (b) is bound to a solid support.
[1295] 44. The method of paragraphs 41 or 42, where Ara h 2, or a fragment thereof, is bound to a solid support.
[1296] 45. The method of paragraph 41, where antibody binding is detected using an enzyme-linked immunosorbent assay.
[1297] 1. An isolated antibody that binds to Ara h 2 (conglutin-7), or an antigen-binding fragment thereof, wherein the antibody comprises the following six complementarity determining regions (CDRs):
[1298] (a) an CDR-H1 comprising the amino acid sequence of (SEQ ID NO: 301);
[1299] (b) an CDR-H2 comprising the amino acid sequence of (SEQ ID NO: 302);
[1300] (c) an CDR-H3 comprising the amino acid sequence of (SEQ ID NO: 303);
[1301] (d) an CDR-L1 comprising the amino acid sequence of (SEQ ID NO: 304);
[1302] (e) an CDR-L2 comprising the amino acid sequence of (SEQ ID NO: 305); and
[1303] (f) an CDR-L3 comprising the amino acid sequence of (SEQ ID NO: 306).
[1304] 2. The antibody of paragraph 1, wherein the antibody comprises
[1305] (a) a heavy chain variable (VH) domain comprising an amino sequence having at least 90%, at least 95%, or at least 99% sequence identity to the amino acid sequence of SEQ ID NO: 307;
[1306] (b) a light chain variable (VL) domain comprising an amino acid sequence having at least 90%, at least 95%, or at least 99% identity to the amino acid sequence of SEQ ID NO: 308; or (c) a VH domain as in (a) and a VL domain as in (b).
[1307] 3. The antibody of paragraph 1 or 2, further comprising the following VH domain framework regions (FRs):
[1308] (a) an FR-H1 comprising the amino acid sequence of (SEQ ID NO: 309);
[1309] (b) an FR-H2 comprising the amino acid sequence of (SEQ ID NO: 310);
[1310] (c) an FR-H3 comprising the amino acid sequence of (SEQ ID NO: 311); and
[1311] (d) an FR-H4 comprising the amino acid sequence of (SEQ ID NO: 312).
[1312] 4. The antibody of any one of paragraphs 1-3, wherein the VH domain comprises the amino acid sequence of SEQ ID NO: 307.
[1313] 5. The antibody of any one of paragraphs 1-4, further comprising the following VL domain FRs:
[1314] (a) an FR-L1 comprising the amino acid sequence of (SEQ ID NO: 313);
[1315] (b) an FR-L2 comprising the amino acid sequence of (SEQ ID NO: 314);
[1316] (c) an FR-L3 comprising the amino acid sequence of (SEQ ID NO: 315); and
[1317] (d) an FR-L4 comprising the amino acid sequence of (SEQ ID NO: 316).
[1318] 6. The antibody of any one of paragraphs 1-5, wherein the VL domain comprises the amino acid sequence of SEQ ID NO: 308.
[1319] 7. An isolated antibody that binds to Ara h 2, or an antigen-binding fragment thereof, wherein the antibody comprises
[1320] (a) a VH domain comprising an amino acid sequence having at least 90%, at least 95%, or at least 99% sequence identity to the amino acid sequence of SEQ ID NO: 307 and
[1321] (b) a VL domain comprising an amino acid sequence having at least 90%, at least 95%, or at least 99% sequence identity to the amino acid sequence of SEQ ID NO: 308.
[1322] 8. The antibody of paragraph 7, wherein the antibody comprises a VH domain comprising the amino acid sequence of SEQ ID NO: 307 and a VL domain comprising the amino acid sequence of SEQ ID NO: 308.
[1323] 9. The antibody of any one of paragraphs 1-8, wherein the antibody comprises (a) a heavy chain comprising the amino acid sequence of SEQ ID NO: 317 and (b) a light chain comprising the amino acid sequence of SEQ ID NO: 318.
[1324] 10. The antibody of any one of paragraphs 1-9, wherein the antibody binds Ara h 2 with a KD of about 50 nM or less.
[1325] 11. The method of paragraph 10, wherein the KD is measured by a surface plasmon resonance assay.
[1326] 12. The antibody of paragraph 11, wherein the antibody binds Ara h 2 with a KD of between about 0.1 pM and about 40 nM.
[1327] 13. The antibody of paragraph 12, wherein the antibody binds Ara h 2 with a KD of between about 120 pM and about 20 nM.
[1328] 14. The antibody of paragraph 13, wherein the antibody binds Ara h 2 with a KD of between about 120 pM and about 10 nM.
[1329] 15. The antibody of any one of paragraphs 1-14, wherein the antibody is capable neutralizing Ara h 2
[1330] 16. An antibody that binds to the same epitope as the antibody of any one of paragraph 1-15.
[1331] 17. An antibody that competes for binding to Ara h 2 with, or cross-blocks or is cross-blocked by, the antibody of any one of paragraphs 1-16.
[1332] 18. The antibody of paragraph 16 or 17, wherein whether the antibody binds to the same epitope or competes for binding to Ara h 2 is determined by an epitope binning assay.
[1333] 19. The antibody of any one of paragraphs 1-18, wherein the antibody is monoclonal.
[1334] 20. The antibody of any one of paragraphs 1-19, wherein the antibody is humanized.
[1335] 21. The antibody of any one of paragraphs 1-20, wherein the antibody is an antibody fragment that binds Ara h 2.
[1336] 22. The antibody of paragraph 21, wherein the antibody fragment is selected from the group consisting of Fab, Fab′-SH, Fv, scFv, and (Fab′)2 fragments.
[1337] 23. The antibody of any one of paragraphs 1-22, wherein the antibody is a full-length antibody.
[1338] 24. The antibody of paragraph 23, wherein the antibody is an IgG antibody.
[1339] 25. The antibody of paragraph 24, wherein the IgG antibody is an IgG1 antibody.
[1340] 26. The antibody of paragraph 25, wherein the IgG antibody is an IgG4 antibody.
[1341] 27. The antibody of paragraph 26, wherein the IgG4 antibody comprises an S228P mutation (EU numbering).
[1342] 28. The antibody of any one of paragraphs 1-27, wherein the antibody is a monospecific antibody.
[1343] 29. The antibody of any one of paragraphs 1-28, wherein the antibody is a multispecific antibody.
[1344] 30. The antibody of paragraph 29, wherein the antibody is a bispecific antibody.
[1345] 31. A polynucleotide encoding an isolated antibody of any one of paragraphs 1-30.
[1346] 32. A vector comprising the polynucleotide of paragraph 31.
[1347] 33. A host cell comprising the vector of paragraph 32.
[1348] 34. A method of producing the antibody of any one of paragraphs 1-33, the method comprising culturing a host cell that comprises the vector of paragraph 32 and recovering the antibody.
[1349] 35. The method of paragraph 34, wherein the host cell is prokaryotic.
[1350] 36. The method of paragraph 35, wherein the host cell is Escherichia coli.
[1351] 37. The method of paragraph 34, wherein the host cell is eukaryotic.
[1352] 38. The method of paragraph 37, wherein the host cell is a 293 cell, a CHO cell, a yeast cell, or a plant cell.
[1353] 39. A method for treating a patient who demonstrates a sensitivity to, or an allergic reaction against, a nut or a portion thereof or an extract thereof, or to Ara h 2 protein, or for treating at least one symptom or complication associated with a sensitivity to, or allergic reaction against a nut or a portion thereof or an extract thereof, or to Ara h 2, comprising administering an effective amount of one or more isolated antibodies or antigen-binding fragments thereof that bind specifically to Ara h 2, according to any of paragraphs 1-30.
[1354] 40. The method of paragraph 39, further comprising administering an effective amount of a second therapeutic agent useful for diminishing an allergic reaction an allergic reaction against, a nut or a portion thereof or an extract thereof, or to Ara h 2 protein.
[1355] 41. A method for detecting the presence of Ara h 2 neutralizing antibodies in a biological sample, comprising:
[1356] (a) providing a sample from a subject;
[1357] (b) contacting the sample with a mixture comprising:
   [1358] (i) the antibody of any one of paragraphs 1-30 and
   [1359] (ii) Ara h 2, or a fragment thereof; and
[1360] (c) detecting the binding of antibodies present in the biological sample to Ara h 2, or a fragment thereof.
[1361] 42. The method of paragraph 41, where antibody binding is detected using tandem bio-layer interferometry.
[1362] 43. The method of paragraphs 41 or 42, where the antibody from step (b) is bound to a solid support.
[1363] 44. The method of paragraphs 41 or 42, where Ara h 2, or a fragment thereof, is bound to a solid support.
[1364] 45. The method of paragraph 41, where antibody binding is detected using an enzyme-linked immunosorbent assay.
[1365] 1. An isolated antibody that binds to Ara h 2 (conglutin-7), or an antigen-binding fragment thereof, wherein the antibody comprises the following six complementarity determining regions (CDRs):
[1366] (a) an CDR-H1 comprising the amino acid sequence of (SEQ ID NO: 321);
[1367] (b) an CDR-H2 comprising the amino acid sequence of (SEQ ID NO: 322);
[1368] (c) an CDR-H3 comprising the amino acid sequence of (SEQ ID NO: 323);
[1369] (d) an CDR-L1 comprising the amino acid sequence of (SEQ ID NO: 324);
[1370] (e) an CDR-L2 comprising the amino acid sequence of (SEQ ID NO: 325); and
[1371] (f) an CDR-L3 comprising the amino acid sequence of (SEQ ID NO: 326).
[1372] 2. The antibody of paragraph 1, wherein the antibody comprises
[1373] (a) a heavy chain variable (VH) domain comprising an amino sequence having at least 90%, at least 95%, or at least 99% sequence identity to the amino acid sequence of SEQ ID NO: 327;
[1374] (b) a light chain variable (VL) domain comprising an amino acid sequence having at least 90%, at least 95%, or at least 99% identity to the amino acid sequence of SEQ ID NO: 328; or (c) a VH domain as in (a) and a VL domain as in (b).
[1375] 3. The antibody of paragraph 1 or 2, further comprising the following VH domain framework regions (FRs):
[1376] (a) an FR-H1 comprising the amino acid sequence of (SEQ ID NO: 329);
[1377] (b) an FR-H2 comprising the amino acid sequence of (SEQ ID NO: 330);
[1378] (c) an FR-H3 comprising the amino acid sequence of (SEQ ID NO: 331); and
[1379] (d) an FR-H4 comprising the amino acid sequence of (SEQ ID NO: 332).
[1380] 4. The antibody of any one of paragraphs 1-3, wherein the VH domain comprises the amino acid sequence of SEQ ID NO: 327.
[1381] 5. The antibody of any one of paragraphs 1-4, further comprising the following VL domain FRs:
[1382] (a) an FR-L1 comprising the amino acid sequence of (SEQ ID NO: 333);
[1383] (b) an FR-L2 comprising the amino acid sequence of (SEQ ID NO: 334);
[1384] (c) an FR-L3 comprising the amino acid sequence of (SEQ ID NO: 335); and
[1385] (d) an FR-L4 comprising the amino acid sequence of (SEQ ID NO: 336).
[1386] 6. The antibody of any one of paragraphs 1-5, wherein the VL domain comprises the amino acid sequence of SEQ ID NO: 328.
[1387] 7. An isolated antibody that binds to Ara h 2, or an antigen-binding fragment thereof, wherein the antibody comprises
[1388] (a) a VH domain comprising an amino acid sequence having at least 90%, at least 95%, or at least 99% sequence identity to the amino acid sequence of SEQ ID NO: 327 and
[1389] (b) a VL domain comprising an amino acid sequence having at least 90%, at least 95%, or at least 99% sequence identity to the amino acid sequence of SEQ ID NO: 328.
[1390] 8. The antibody of paragraph 7, wherein the antibody comprises a VH domain comprising the amino acid sequence of SEQ ID NO: 327 and a VL domain comprising the amino acid sequence of SEQ ID NO: 328.
[1391] 9. The antibody of any one of paragraphs 1-8, wherein the antibody comprises (a) a heavy chain comprising the amino acid sequence of SEQ ID NO: 337 and (b) a light chain comprising the amino acid sequence of SEQ ID NO: 338.
[1392] 10. The antibody of any one of paragraphs 1-9, wherein the antibody binds Ara h 2 with a KD of about 50 nM or less.
[1393] 11. The method of paragraph 10, wherein the KD is measured by a surface plasmon resonance assay.
[1394] 12. The antibody of paragraph 11, wherein the antibody binds Ara h 2 with a KD of between about 0.1 pM and about 40 nM.
[1395] 13. The antibody of paragraph 12, wherein the antibody binds Ara h 2 with a KD of between about 120 pM and about 20 nM.
[1396] 14. The antibody of paragraph 13, wherein the antibody binds Ara h 2 with a KD of between about 120 pM and about 10 nM.
[1397] 15. The antibody of any one of paragraphs 1-14, wherein the antibody is capable neutralizing Ara h 2
[1398] 16. An antibody that binds to the same epitope as the antibody of any one of paragraph 1-15.
[1399] 17. An antibody that competes for binding to Ara h 2 with, or cross-blocks or is cross-blocked by, the antibody of any one of paragraphs 1-16.
[1400] 18. The antibody of paragraph 16 or 17, wherein whether the antibody binds to the same epitope or competes for binding to Ara h 2 is determined by an epitope binning assay.
[1401] 19. The antibody of any one of paragraphs 1-18, wherein the antibody is monoclonal.
[1402] 20. The antibody of any one of paragraphs 1-19, wherein the antibody is humanized.
[1403] 21. The antibody of any one of paragraphs 1-20, wherein the antibody is an antibody fragment that binds Ara h 2.
[1404] 22. The antibody of paragraph 21, wherein the antibody fragment is selected from the group consisting of Fab, Fab′-SH, Fv, scFv, and (Fab′)2 fragments.
[1405] 23. The antibody of any one of paragraphs 1-22, wherein the antibody is a full-length antibody.
[1406] 24. The antibody of paragraph 23, wherein the antibody is an IgG antibody.
[1407] 25. The antibody of paragraph 24, wherein the IgG antibody is an IgG1 antibody.
[1408] 26. The antibody of paragraph 25, wherein the IgG antibody is an IgG4 antibody.
[1409] 27. The antibody of paragraph 26, wherein the IgG4 antibody comprises an S228P mutation (EU numbering).
[1410] 28. The antibody of any one of paragraphs 1-27, wherein the antibody is a monospecific antibody.
[1411] 29. The antibody of any one of paragraphs 1-28, wherein the antibody is a multispecific antibody.
[1412] 30. The antibody of paragraph 29, wherein the antibody is a bispecific antibody.
[1413] 31. A polynucleotide encoding an isolated antibody of any one of paragraphs 1-30.
[1414] 32. A vector comprising the polynucleotide of paragraph 31.
[1415] 33. A host cell comprising the vector of paragraph 32.
[1416] 34. A method of producing the antibody of any one of paragraphs 1-33, the method comprising culturing a host cell that comprises the vector of paragraph 32 and recovering the antibody.
[1417] 35. The method of paragraph 34, wherein the host cell is prokaryotic.
[1418] 36. The method of paragraph 35, wherein the host cell is Escherichia coli.
[1419] 37. The method of paragraph 34, wherein the host cell is eukaryotic.
[1420] 38. The method of paragraph 37, wherein the host cell is a 293 cell, a CHO cell, a yeast cell, or a plant cell.
[1421] 39. A method for treating a patient who demonstrates a sensitivity to, or an allergic reaction against, a nut or a portion thereof or an extract thereof, or to Ara h 2 protein, or for treating at least one symptom or complication associated with a sensitivity to, or allergic reaction against a nut or a portion thereof or an extract thereof, or to Ara h 2, comprising administering an effective amount of one or more isolated antibodies or antigen-binding fragments thereof that bind specifically to Ara h 2, according to any of paragraphs 1-30.
[1422] 40. The method of paragraph 39, further comprising administering an effective amount of a second therapeutic agent useful for diminishing an allergic reaction an allergic reaction against, a nut or a portion thereof or an extract thereof, or to Ara h 2 protein.
[1423] 41. A method for detecting the presence of Ara h 2 neutralizing antibodies in a biological sample, comprising:
[1424] (a) providing a sample from a subject;
[1425] (b) contacting the sample with a mixture comprising:
   [1426] (i) the antibody of any one of paragraphs 1-30 and
   [1427] (ii) Ara h 2, or a fragment thereof; and
[1428] (c) detecting the binding of antibodies present in the biological sample to Ara h 2, or a fragment thereof.
[1429] 42. The method of paragraph 41, where antibody binding is detected using tandem bio-layer interferometry.
[1430] 43. The method of paragraphs 41 or 42, where the antibody from step (b) is bound to a solid support.
[1431] 44. The method of paragraphs 41 or 42, where Ara h 2, or a fragment thereof, is bound to a solid support.
[1432] 45. The method of paragraph 41, where antibody binding is detected using an enzyme-linked immunosorbent assay.

### P34:

[1433] 1. An isolated antibody that binds to Ara h 2 (conglutin-7), or an antigen-binding fragment thereof, wherein the antibody comprises the following six complementarity determining regions (CDRs):
[1434] (a) an CDR-H1 comprising the amino acid sequence of (SEQ ID NO: 341);
[1435] (b) an CDR-H2 comprising the amino acid sequence of (SEQ ID NO: 342);
[1436] (c) an CDR-H3 comprising the amino acid sequence of (SEQ ID NO: 343);
[1437] (d) an CDR-L1 comprising the amino acid sequence of (SEQ ID NO: 344);
[1438] (e) an CDR-L2 comprising the amino acid sequence of (SEQ ID NO: 345); and
[1439] (f) an CDR-L3 comprising the amino acid sequence of (SEQ ID NO: 346).
[1440] 2. The antibody of paragraph 1, wherein the antibody comprises
[1441] (a) a heavy chain variable (VH) domain comprising an amino sequence having at least 90%, at least 95%, or at least 99% sequence identity to the amino acid sequence of SEQ ID NO: 347;
[1442] (b) a light chain variable (VL) domain comprising an amino acid sequence having at least 90%, at least 95%, or at least 99% identity to the amino acid sequence of SEQ ID NO: 348; or (c) a VH domain as in (a) and a VL domain as in (b).
[1443] 3. The antibody of paragraph 1 or 2, further comprising the following VH domain framework regions (FRs):
[1444] (a) an FR-H1 comprising the amino acid sequence of (SEQ ID NO: 349);
[1445] (b) an FR-H2 comprising the amino acid sequence of (SEQ ID NO: 350);
[1446] (c) an FR-H3 comprising the amino acid sequence of (SEQ ID NO: 351); and
[1447] (d) an FR-H4 comprising the amino acid sequence of (SEQ ID NO: 352).
[1448] 4. The antibody of any one of paragraphs 1-3, wherein the VH domain comprises the amino acid sequence of SEQ ID NO: 347.
[1449] 5. The antibody of any one of paragraphs 1-4, further comprising the following VL domain FRs:
[1450] (a) an FR-L1 comprising the amino acid sequence of (SEQ ID NO: 353);
[1451] (b) an FR-L2 comprising the amino acid sequence of (SEQ ID NO: 354);
[1452] (c) an FR-L3 comprising the amino acid sequence of (SEQ ID NO: 355); and
[1453] (d) an FR-L4 comprising the amino acid sequence of (SEQ ID NO: 356).
[1454] 6. The antibody of any one of paragraphs 1-5, wherein the VL domain comprises the amino acid sequence of SEQ ID NO: 348.
[1455] 7. An isolated antibody that binds to Ara h 2, or an antigen-binding fragment thereof, wherein the antibody comprises
[1456] (a) a VH domain comprising an amino acid sequence having at least 90%, at least 95%, or at least 99% sequence identity to the amino acid sequence of SEQ ID NO: 347 and
[1457] (b) a VL domain comprising an amino acid sequence having at least 90%, at least 95%, or at least 99% sequence identity to the amino acid sequence of SEQ ID NO: 348.
[1458] 8. The antibody of paragraph 7, wherein the antibody comprises a VH domain comprising the amino acid sequence of SEQ ID NO: 347 and a VL domain comprising the amino acid sequence of SEQ ID NO: 348.
[1459] 9. The antibody of any one of paragraphs 1-8, wherein the antibody comprises (a) a heavy chain comprising the amino acid sequence of SEQ ID NO: 357 and (b) a light chain comprising the amino acid sequence of SEQ ID NO: 358.
[1460] 10. The antibody of any one of paragraphs 1-9, wherein the antibody binds Ara h 2 with a KD of about 50 nM or less.
[1461] 11. The method of paragraph 10, wherein the KD is measured by a surface plasmon resonance assay.
[1462] 12. The antibody of paragraph 11, wherein the antibody binds Ara h 2 with a KD of between about 0.1 pM and about 40 nM.
[1463] 13. The antibody of paragraph 12, wherein the antibody binds Ara h 2 with a KD of between about 120 pM and about 20 nM.
[1464] 14. The antibody of paragraph 13, wherein the antibody binds Ara h 2 with a KD of between about 120 pM and about 10 nM.
[1465] 15. The antibody of any one of paragraphs 1-14, wherein the antibody is capable neutralizing Ara h 2
[1466] 16. An antibody that binds to the same epitope as the antibody of any one of paragraph 1-15.
[1467] 17. An antibody that competes for binding to Ara h 2 with, or cross-blocks or is cross-blocked by, the antibody of any one of paragraphs 1-16.
[1468] 18. The antibody of paragraph 16 or 17, wherein whether the antibody binds to the same epitope or competes for binding to Ara h 2 is determined by an epitope binning assay.
[1469] 19. The antibody of any one of paragraphs 1-18, wherein the antibody is monoclonal.
[1470] 20. The antibody of any one of paragraphs 1-19, wherein the antibody is humanized.
[1471] 21. The antibody of any one of paragraphs 1-20, wherein the antibody is an antibody fragment that binds Ara h 2.
[1472] 22. The antibody of paragraph 21, wherein the antibody fragment is selected from the group consisting of Fab, Fab′-SH, Fv, scFv, and (Fab′)2 fragments.
[1473] 23. The antibody of any one of paragraphs 1-22, wherein the antibody is a full-length antibody.
[1474] 24. The antibody of paragraph 23, wherein the antibody is an IgG antibody.
[1475] 25. The antibody of paragraph 24, wherein the IgG antibody is an IgG1 antibody.
[1476] 26. The antibody of paragraph 25, wherein the IgG antibody is an IgG4 antibody.
[1477] 27. The antibody of paragraph 26, wherein the IgG4 antibody comprises an S228P mutation (EU numbering).
[1478] 28. The antibody of any one of paragraphs 1-27, wherein the antibody is a monospecific antibody.
[1479] 29. The antibody of any one of paragraphs 1-28, wherein the antibody is a multispecific antibody.
[1480] 30. The antibody of paragraph 29, wherein the antibody is a bispecific antibody.
[1481] 31. A polynucleotide encoding an isolated antibody of any one of paragraphs 1-30.
[1482] 32. A vector comprising the polynucleotide of paragraph 31.
[1483] 33. A host cell comprising the vector of paragraph 32.
[1484] 34. A method of producing the antibody of any one of paragraphs 1-33, the method comprising culturing a host cell that comprises the vector of paragraph 32 and recovering the antibody.
[1485] 35. The method of paragraph 34, wherein the host cell is prokaryotic.
[1486] 36. The method of paragraph 35, wherein the host cell is Escherichia coli.
[1487] 37. The method of paragraph 34, wherein the host cell is eukaryotic.
[1488] 38. The method of paragraph 37, wherein the host cell is a 293 cell, a CHO cell, a yeast cell, or a plant cell.
[1489] 39. A method for treating a patient who demonstrates a sensitivity to, or an allergic reaction against, a nut or a portion thereof or an extract thereof, or to Ara h 2 protein, or for treating at least one symptom or complication associated with a sensitivity to, or allergic reaction against a nut or a portion thereof or an extract thereof, or to Ara h 2, comprising administering an effective amount of one or more isolated antibodies or antigen-binding fragments thereof that bind specifically to Ara h 2, according to any of paragraphs 1-30.
[1490] 40. The method of paragraph 39, further comprising administering an effective amount of a second therapeutic agent useful for diminishing an allergic reaction an allergic reaction against, a nut or a portion thereof or an extract thereof, or to Ara h 2 protein.
[1491] 41. A method for detecting the presence of Ara h 2 neutralizing antibodies in a biological sample, comprising:
[1492] (a) providing a sample from a subject;
[1493] (b) contacting the sample with a mixture comprising:
   [1494] (i) the antibody of any one of paragraphs 1-30 and
   [1495] (ii) Ara h 2, or a fragment thereof; and
[1496] (c) detecting the binding of antibodies present in the biological sample to Ara h 2, or a fragment thereof.
[1497] 42. The method of paragraph 41, where antibody binding is detected using tandem bio-layer interferometry.
[1498] 43. The method of paragraphs 41 or 42, where the antibody from step (b) is bound to a solid support.
[1499] 44. The method of paragraphs 41 or 42, where Ara h 2, or a fragment thereof, is bound to a solid support.
[1500] 45. The method of paragraph 41, where antibody binding is detected using an enzyme-linked immunosorbent assay.

### P39:

[1501] 1. An isolated antibody that binds to Ara h 2 (conglutin-7), or an antigen-binding fragment thereof, wherein the antibody comprises the following six complementarity determining regions (CDRs):
[1502] (a) an CDR-H1 comprising the amino acid sequence of (SEQ ID NO: 361);
[1503] (b) an CDR-H2 comprising the amino acid sequence of (SEQ ID NO: 362);
[1504] (c) an CDR-H3 comprising the amino acid sequence of (SEQ ID NO: 363);
[1505] (d) an CDR-L1 comprising the amino acid sequence of (SEQ ID NO: 364);
[1506] (e) an CDR-L2 comprising the amino acid sequence of (SEQ ID NO: 365); and
[1507] (f) an CDR-L3 comprising the amino acid sequence of (SEQ ID NO: 366).
[1508] 2. The antibody of paragraph 1, wherein the antibody comprises
[1509] (a) a heavy chain variable (VH) domain comprising an amino sequence having at least 90%, at least 95%, or at least 99% sequence identity to the amino acid sequence of SEQ ID NO: 367;
[1510] (b) a light chain variable (VL) domain comprising an amino acid sequence having at least 90%, at least 95%, or at least 99% identity to the amino acid sequence of SEQ ID NO: 368; or (c) a VH domain as in (a) and a VL domain as in (b).
[1511] 3. The antibody of paragraph 1 or 2, further comprising the following VH domain framework regions (FRs):
[1512] (a) an FR-H1 comprising the amino acid sequence of (SEQ ID NO: 369);
[1513] (b) an FR-H2 comprising the amino acid sequence of (SEQ ID NO: 370);
[1514] (c) an FR-H3 comprising the amino acid sequence of (SEQ ID NO: 371); and
[1515] (d) an FR-H4 comprising the amino acid sequence of (SEQ ID NO: 372).
[1516] 4. The antibody of any one of paragraphs 1-3, wherein the VH domain comprises the amino acid sequence of SEQ ID NO: 367.
[1517] 5. The antibody of any one of paragraphs 1-4, further comprising the following VL domain FRs:
[1518] (a) an FR-L1 comprising the amino acid sequence of (SEQ ID NO: 373);
[1519] (b) an FR-L2 comprising the amino acid sequence of (SEQ ID NO: 374);
[1520] (c) an FR-L3 comprising the amino acid sequence of (SEQ ID NO: 375); and
[1521] (d) an FR-L4 comprising the amino acid sequence of (SEQ ID NO: 376).
[1522] 6. The antibody of any one of paragraphs 1-5, wherein the VL domain comprises the amino acid sequence of SEQ ID NO: 368.
[1523] 7. An isolated antibody that binds to Ara h 2, or an antigen-binding fragment thereof, wherein the antibody comprises
[1524] (a) a VH domain comprising an amino acid sequence having at least 90%, at least 95%, or at least 99% sequence identity to the amino acid sequence of SEQ ID NO: 367 and
[1525] (b) a VL domain comprising an amino acid sequence having at least 90%, at least 95%, or at least 99% sequence identity to the amino acid sequence of SEQ ID NO: 368.
[1526] 8. The antibody of paragraph 7, wherein the antibody comprises a VH domain comprising the amino acid sequence of SEQ ID NO: 367 and a VL domain comprising the amino acid sequence of SEQ ID NO: 368.
[1527] 9. The antibody of any one of paragraphs 1-8, wherein the antibody comprises (a) a heavy chain comprising the amino acid sequence of SEQ ID NO: 377 and (b) a light chain comprising the amino acid sequence of SEQ ID NO: 378.
[1528] 10. The antibody of any one of paragraphs 1-9, wherein the antibody binds Ara h 2 with a KD of about 50 nM or less.
[1529] 11. The method of paragraph 10, wherein the KD is measured by a surface plasmon resonance assay.
[1530] 12. The antibody of paragraph 11, wherein the antibody binds Ara h 2 with a KD of between about 0.1 pM and about 40 nM.
[1531] 13. The antibody of paragraph 12, wherein the antibody binds Ara h 2 with a KD of between about 120 pM and about 20 nM.
[1532] 14. The antibody of paragraph 13, wherein the antibody binds Ara h 2 with a KD of between about 120 pM and about 10 nM.
[1533] 15. The antibody of any one of paragraphs 1-14, wherein the antibody is capable neutralizing Ara h 2
[1534] 16. An antibody that binds to the same epitope as the antibody of any one of paragraph 1-15.
[1535] 17. An antibody that competes for binding to Ara h 2 with, or cross-blocks or is cross-blocked by, the antibody of any one of paragraphs 1-16.
[1536] 18. The antibody of paragraph 16 or 17, wherein whether the antibody binds to the same epitope or competes for binding to Ara h 2 is determined by an epitope binning assay.
[1537] 19. The antibody of any one of paragraphs 1-18, wherein the antibody is monoclonal.
[1538] 20. The antibody of any one of paragraphs 1-19, wherein the antibody is humanized.
[1539] 21. The antibody of any one of paragraphs 1-20, wherein the antibody is an antibody fragment that binds Ara h 2.
[1540] 22. The antibody of paragraph 21, wherein the antibody fragment is selected from the group consisting of Fab, Fab′-SH, Fv, scFv, and (Fab′)2 fragments.
[1541] 23. The antibody of any one of paragraphs 1-22, wherein the antibody is a full-length antibody.
[1542] 24. The antibody of paragraph 23, wherein the antibody is an IgG antibody.
[1543] 25. The antibody of paragraph 24, wherein the IgG antibody is an IgG1 antibody.
[1544] 26. The antibody of paragraph 25, wherein the IgG antibody is an IgG4 antibody.
[1545] 27. The antibody of paragraph 26, wherein the IgG4 antibody comprises an S228P mutation (EU numbering).
[1546] 28. The antibody of any one of paragraphs 1-27, wherein the antibody is a monospecific antibody.
[1547] 29. The antibody of any one of paragraphs 1-28, wherein the antibody is a multispecific antibody.
[1548] 30. The antibody of paragraph 29, wherein the antibody is a bispecific antibody.
[1549] 31. A polynucleotide encoding an isolated antibody of any one of paragraphs 1-30.
[1550] 32. A vector comprising the polynucleotide of paragraph 31.
[1551] 33. A host cell comprising the vector of paragraph 32.
[1552] 34. A method of producing the antibody of any one of paragraphs 1-33, the method comprising culturing a host cell that comprises the vector of paragraph 32 and recovering the antibody.
[1553] 35. The method of paragraph 34, wherein the host cell is prokaryotic.
[1554] 36. The method of paragraph 35, wherein the host cell is Escherichia coli.
[1555] 37. The method of paragraph 34, wherein the host cell is eukaryotic.
[1556] 38. The method of paragraph 37, wherein the host cell is a 293 cell, a CHO cell, a yeast cell, or a plant cell.
[1557] 39. A method for treating a patient who demonstrates a sensitivity to, or an allergic reaction against, a nut or a portion thereof or an extract thereof, or to Ara h 2 protein, or for treating at least one symptom or complication associated with a sensitivity to, or allergic reaction against a nut or a portion thereof or an extract thereof, or to Ara h 2, comprising administering an effective amount of one or more isolated antibodies or antigen-binding fragments thereof that bind specifically to Ara h 2, according to any of paragraphs 1-30.
[1558] 40. The method of paragraph 39, further comprising administering an effective amount of a second therapeutic agent useful for diminishing an allergic reaction an allergic reaction against, a nut or a portion thereof or an extract thereof, or to Ara h 2 protein.
[1559] 41. A method for detecting the presence of Ara h 2 neutralizing antibodies in a biological sample, comprising:
[1560] (a) providing a sample from a subject;
[1561] (b) contacting the sample with a mixture comprising:
   [1562] (i) the antibody of any one of paragraphs 1-30 and
   [1563] (ii) Ara h 2, or a fragment thereof; and
[1564] (c) detecting the binding of antibodies present in the biological sample to Ara h 2, or a fragment thereof.
[1565] 42. The method of paragraph 41, where antibody binding is detected using tandem bio-layer interferometry.
[1566] 43. The method of paragraphs 41 or 42, where the antibody from step (b) is bound to a solid support.
[1567] 44. The method of paragraphs 41 or 42, where Ara h 2, or a fragment thereof, is bound to a solid support.
[1568] 45. The method of paragraph 41, where antibody binding is detected using an enzyme-linked immunosorbent assay.

### S1:

[1569] 1. An isolated antibody that binds to Ara h 2 (conglutin-7), or an antigen-binding fragment thereof, wherein the antibody comprises the following six complementarity determining regions (CDRs):
[1570] (a) an CDR-H1 comprising the amino acid sequence of (SEQ ID NO: 381);
[1571] (b) an CDR-H2 comprising the amino acid sequence of (SEQ ID NO: 382);
[1572] (c) an CDR-H3 comprising the amino acid sequence of (SEQ ID NO: 383);
[1573] (d) an CDR-L1 comprising the amino acid sequence of (SEQ ID NO: 384);
[1574] (e) an CDR-L2 comprising the amino acid sequence of (SEQ ID NO: 385); and
[1575] (f) an CDR-L3 comprising the amino acid sequence of (SEQ ID NO: 386).
[1576] 2. The antibody of paragraph 1, wherein the antibody comprises
[1577] (a) a heavy chain variable (VH) domain comprising an amino sequence having at least 90%, at least 95%, or at least 99% sequence identity to the amino acid sequence of SEQ ID NO: 387;
[1578] (b) a light chain variable (VL) domain comprising an amino acid sequence having at least 90%, at least 95%, or at least 99% identity to the amino acid sequence of SEQ ID NO: 388; or (c) a VH domain as in (a) and a VL domain as in (b).
[1579] 3. The antibody of paragraph 1 or 2, further comprising the following VH domain framework regions (FRs):
[1580] (a) an FR-H1 comprising the amino acid sequence of (SEQ ID NO: 389);
[1581] (b) an FR-H2 comprising the amino acid sequence of (SEQ ID NO: 390);
[1582] (c) an FR-H3 comprising the amino acid sequence of (SEQ ID NO: 391); and
[1583] (d) an FR-H4 comprising the amino acid sequence of (SEQ ID NO: 392).
[1584] 4. The antibody of any one of paragraphs 1-3, wherein the VH domain comprises the amino acid sequence of SEQ ID NO: 387.
[1585] 5. The antibody of any one of paragraphs 1-4, further comprising the following VL domain FRs:
[1586] (a) an FR-L1 comprising the amino acid sequence of (SEQ ID NO: 393);
[1587] (b) an FR-L2 comprising the amino acid sequence of (SEQ ID NO: 394);
[1588] (c) an FR-L3 comprising the amino acid sequence of (SEQ ID NO: 395); and
[1589] (d) an FR-L4 comprising the amino acid sequence of (SEQ ID NO: 396).
[1590] 6. The antibody of any one of paragraphs 1-5, wherein the VL domain comprises the amino acid sequence of SEQ ID NO: 388.
[1591] 7. An isolated antibody that binds to Ara h 2, or an antigen-binding fragment thereof, wherein the antibody comprises
[1592] (a) a VH domain comprising an amino acid sequence having at least 90%, at least 95%, or at least 99% sequence identity to the amino acid sequence of SEQ ID NO: 387 and
[1593] (b) a VL domain comprising an amino acid sequence having at least 90%, at least 95%, or at least 99% sequence identity to the amino acid sequence of SEQ ID NO: 388.
[1594] 8. The antibody of paragraph 7, wherein the antibody comprises a VH domain comprising the amino acid sequence of SEQ ID NO: 387 and a VL domain comprising the amino acid sequence of SEQ ID NO: 388.
[1595] 9. The antibody of any one of paragraphs 1-8, wherein the antibody comprises (a) a heavy chain comprising the amino acid sequence of SEQ ID NO: 397 and (b) a light chain comprising the amino acid sequence of SEQ ID NO: 398.
[1596] 10. The antibody of any one of paragraphs 1-9, wherein the antibody binds Ara h 2 with a KD of about 50 nM or less.
[1597] 11. The method of paragraph 10, wherein the KD is measured by a surface plasmon resonance assay.
[1598] 12. The antibody of paragraph 11, wherein the antibody binds Ara h 2 with a KD of between about 0.1 pM and about 40 nM.
[1599] 13. The antibody of paragraph 12, wherein the antibody binds Ara h 2 with a KD of between about 120 pM and about 20 nM.
[1600] 14. The antibody of paragraph 13, wherein the antibody binds Ara h 2 with a KD of between about 120 pM and about 10 nM.
[1601] 15. The antibody of any one of paragraphs 1-14, wherein the antibody is capable neutralizing Ara h 2
[1602] 16. An antibody that binds to the same epitope as the antibody of any one of paragraph 1-15.
[1603] 17. An antibody that competes for binding to Ara h 2 with, or cross-blocks or is cross-blocked by, the antibody of any one of paragraphs 1-16.
[1604] 18. The antibody of paragraph 16 or 17, wherein whether the antibody binds to the same epitope or competes for binding to Ara h 2 is determined by an epitope binning assay.
[1605] 19. The antibody of any one of paragraphs 1-18, wherein the antibody is monoclonal.
[1606] 20. The antibody of any one of paragraphs 1-19, wherein the antibody is humanized.
[1607] 21. The antibody of any one of paragraphs 1-20, wherein the antibody is an antibody fragment that binds Ara h 2.
[1608] 22. The antibody of paragraph 21, wherein the antibody fragment is selected from the group consisting of Fab, Fab′-SH, Fv, scFv, and (Fab′)2 fragments.
[1609] 23. The antibody of any one of paragraphs 1-22, wherein the antibody is a full-length antibody.
[1610] 24. The antibody of paragraph 23, wherein the antibody is an IgG antibody.
[1611] 25. The antibody of paragraph 24, wherein the IgG antibody is an IgG1 antibody.
[1612] 26. The antibody of paragraph 25, wherein the IgG antibody is an IgG4 antibody.
[1613] 27. The antibody of paragraph 26, wherein the IgG4 antibody comprises an S228P mutation (EU numbering).
[1614] 28. The antibody of any one of paragraphs 1-27, wherein the antibody is a monospecific antibody.
[1615] 29. The antibody of any one of paragraphs 1-28, wherein the antibody is a multispecific antibody.
[1616] 30. The antibody of paragraph 29, wherein the antibody is a bispecific antibody.
[1617] 31. A polynucleotide encoding an isolated antibody of any one of paragraphs 1-30.
[1618] 32. A vector comprising the polynucleotide of paragraph 31.
[1619] 33. A host cell comprising the vector of paragraph 32.
[1620] 34. A method of producing the antibody of any one of paragraphs 1-33, the method comprising culturing a host cell that comprises the vector of paragraph 32 and recovering the antibody.
[1621] 35. The method of paragraph 34, wherein the host cell is prokaryotic.
[1622] 36. The method of paragraph 35, wherein the host cell is Escherichia coli.
[1623] 37. The method of paragraph 34, wherein the host cell is eukaryotic.
[1624] 38. The method of paragraph 37, wherein the host cell is a 293 cell, a CHO cell, a yeast cell, or a plant cell.
[1625] 39. A method for treating a patient who demonstrates a sensitivity to, or an allergic reaction against, a nut or a portion thereof or an extract thereof, or to Ara h 2 protein, or for treating at least one symptom or complication associated with a sensitivity to, or allergic reaction against a nut or a portion thereof or an extract thereof, or to Ara h 2, comprising administering an effective amount of one or more isolated antibodies or antigen-binding fragments thereof that bind specifically to Ara h 2, according to any of paragraphs 1-30.
[1626] 40. The method of paragraph 39, further comprising administering an effective amount of a second therapeutic agent useful for diminishing an allergic reaction an allergic reaction against, a nut or a portion thereof or an extract thereof, or to Ara h 2 protein.
[1627] 41. A method for detecting the presence of Ara h 2 neutralizing antibodies in a biological sample, comprising:
[1628] (a) providing a sample from a subject;
[1629] (b) contacting the sample with a mixture comprising:
   [1630] (i) the antibody of any one of paragraphs 1-30 and
   [1631] (ii) Ara h 2, or a fragment thereof; and
[1632] (c) detecting the binding of antibodies present in the biological sample to Ara h 2, or a fragment thereof.
[1633] 42. The method of paragraph 41, where antibody binding is detected using tandem bio-layer interferometry.
[1634] 43. The method of paragraphs 41 or 42, where the antibody from step (b) is bound to a solid support.
[1635] 44. The method of paragraphs 41 or 42, where Ara h 2, or a fragment thereof, is bound to a solid support.
[1636] 45. The method of paragraph 41, where antibody binding is detected using an enzyme-linked immunosorbent assay.

### S4:

[1637] 1. An isolated antibody that binds to Ara h 2 (conglutin-7), or an antigen-binding fragment thereof, wherein the antibody comprises the following six complementarity determining regions (CDRs):
[1638] (a) an CDR-H1 comprising the amino acid sequence of (SEQ ID NO: 401);
[1639] (b) an CDR-H2 comprising the amino acid sequence of (SEQ ID NO: 402);
[1640] (c) an CDR-H3 comprising the amino acid sequence of (SEQ ID NO: 403);
[1641] (d) an CDR-L1 comprising the amino acid sequence of (SEQ ID NO: 404);
[1642] (e) an CDR-L2 comprising the amino acid sequence of (SEQ ID NO: 405); and
[1643] (f) an CDR-L3 comprising the amino acid sequence of (SEQ ID NO: 406).
[1644] 2. The antibody of paragraph 1, wherein the antibody comprises
[1645] (a) a heavy chain variable (VH) domain comprising an amino sequence having at least 90%, at least 95%, or at least 99% sequence identity to the amino acid sequence of SEQ ID NO: 407;
[1646] (b) a light chain variable (VL) domain comprising an amino acid sequence having at least 90%, at least 95%, or at least 99% identity to the amino acid sequence of SEQ ID NO: 408; or (c) a VH domain as in (a) and a VL domain as in (b).
[1647] 3. The antibody of paragraph 1 or 2, further comprising the following VH domain framework regions (FRs):
[1648] (a) an FR-H1 comprising the amino acid sequence of (SEQ ID NO: 409);
[1649] (b) an FR-H2 comprising the amino acid sequence of (SEQ ID NO: 410);
[1650] (c) an FR-H3 comprising the amino acid sequence of (SEQ ID NO: 411); and
[1651] (d) an FR-H4 comprising the amino acid sequence of (SEQ ID NO: 412).
[1652] 4. The antibody of any one of paragraphs 1-3, wherein the VH domain comprises the amino acid sequence of SEQ ID NO: 407.
[1653] 5. The antibody of any one of paragraphs 1-4, further comprising the following VL domain FRs:
[1654] (a) an FR-L1 comprising the amino acid sequence of (SEQ ID NO: 413);
[1655] (b) an FR-L2 comprising the amino acid sequence of (SEQ ID NO: 414);
[1656] (c) an FR-L3 comprising the amino acid sequence of (SEQ ID NO: 415); and
[1657] (d) an FR-L4 comprising the amino acid sequence of (SEQ ID NO: 416).
[1658] 6. The antibody of any one of paragraphs 1-5, wherein the VL domain comprises the amino acid sequence of SEQ ID NO: 408.
[1659] 7. An isolated antibody that binds to Ara h 2, or an antigen-binding fragment thereof, wherein the antibody comprises
[1660] (a) a VH domain comprising an amino acid sequence having at least 90%, at least 95%, or at least 99% sequence identity to the amino acid sequence of SEQ ID NO: 407 and
[1661] (b) a VL domain comprising an amino acid sequence having at least 90%, at least 95%, or at least 99% sequence identity to the amino acid sequence of SEQ ID NO: 408.
[1662] 8. The antibody of paragraph 7, wherein the antibody comprises a VH domain comprising the amino acid sequence of SEQ ID NO: 407 and a VL domain comprising the amino acid sequence of SEQ ID NO: 408.
[1663] 9. The antibody of any one of paragraphs 1-8, wherein the antibody comprises (a) a heavy chain comprising the amino acid sequence of SEQ ID NO: 417 and (b) a light chain comprising the amino acid sequence of SEQ ID NO: 418.
[1664] 10. The antibody of any one of paragraphs 1-9, wherein the antibody binds Ara h 2 with a KD of about 50 nM or less.
[1665] 11. The method of paragraph 10, wherein the KD is measured by a surface plasmon resonance assay.
[1666] 12. The antibody of paragraph 11, wherein the antibody binds Ara h 2 with a KD of between about 0.1 pM and about 40 nM.
[1667] 13. The antibody of paragraph 12, wherein the antibody binds Ara h 2 with a KD of between about 120 pM and about 20 nM.
[1668] 14. The antibody of paragraph 13, wherein the antibody binds Ara h 2 with a KD of between about 120 pM and about 10 nM.
[1669] 15. The antibody of any one of paragraphs 1-14, wherein the antibody is capable neutralizing Ara h 2
[1670] 16. An antibody that binds to the same epitope as the antibody of any one of paragraph 1-15.
[1671] 17. An antibody that competes for binding to Ara h 2 with, or cross-blocks or is cross-blocked by, the antibody of any one of paragraphs 1-16.
[1672] 18. The antibody of paragraph 16 or 17, wherein whether the antibody binds to the same epitope or competes for binding to Ara h 2 is determined by an epitope binning assay.
[1673] 19. The antibody of any one of paragraphs 1-18, wherein the antibody is monoclonal.
[1674] 20. The antibody of any one of paragraphs 1-19, wherein the antibody is humanized.
[1675] 21. The antibody of any one of paragraphs 1-20, wherein the antibody is an antibody fragment that binds Ara h 2.
[1676] 22. The antibody of paragraph 21, wherein the antibody fragment is selected from the group consisting of Fab, Fab′-SH, Fv, scFv, and (Fab′)2 fragments.
[1677] 23. The antibody of any one of paragraphs 1-22, wherein the antibody is a full-length antibody.
[1678] 24. The antibody of paragraph 23, wherein the antibody is an IgG antibody.
[1679] 25. The antibody of paragraph 24, wherein the IgG antibody is an IgG1 antibody.
[1680] 26. The antibody of paragraph 25, wherein the IgG antibody is an IgG4 antibody.
[1681] 27. The antibody of paragraph 26, wherein the IgG4 antibody comprises an S228P mutation (EU numbering).
[1682] 28. The antibody of any one of paragraphs 1-27, wherein the antibody is a monospecific antibody.
[1683] 29. The antibody of any one of paragraphs 1-28, wherein the antibody is a multispecific antibody.
[1684] 30. The antibody of paragraph 29, wherein the antibody is a bispecific antibody.
[1685] 31. A polynucleotide encoding an isolated antibody of any one of paragraphs 1-30.
[1686] 32. A vector comprising the polynucleotide of paragraph 31.
[1687] 33. A host cell comprising the vector of paragraph 32.
[1688] 34. A method of producing the antibody of any one of paragraphs 1-33, the method comprising culturing a host cell that comprises the vector of paragraph 32 and recovering the antibody.
[1689] 35. The method of paragraph 34, wherein the host cell is prokaryotic.
[1690] 36. The method of paragraph 35, wherein the host cell is Escherichia coli.
[1691] 37. The method of paragraph 34, wherein the host cell is eukaryotic.
[1692] 38. The method of paragraph 37, wherein the host cell is a 293 cell, a CHO cell, a yeast cell, or a plant cell.
[1693] 39. A method for treating a patient who demonstrates a sensitivity to, or an allergic reaction against, a nut or a portion thereof or an extract thereof, or to Ara h 2 protein, or for treating at least one symptom or complication associated with a sensitivity to, or allergic reaction against a nut or a portion thereof or an extract thereof, or to Ara h 2, comprising administering an effective amount of one or more isolated antibodies or antigen-binding fragments thereof that bind specifically to Ara h 2, according to any of paragraphs 1-30.
[1694] 40. The method of paragraph 39, further comprising administering an effective amount of a second therapeutic agent useful for diminishing an allergic reaction an allergic reaction against, a nut or a portion thereof or an extract thereof, or to Ara h 2 protein.
[1695] 41. A method for detecting the presence of Ara h 2 neutralizing antibodies in a biological sample, comprising:
[1696] (a) providing a sample from a subject;
[1697] (b) contacting the sample with a mixture comprising:
   [1698] (i) the antibody of any one of paragraphs 1-30 and
   [1699] (ii) Ara h 2, or a fragment thereof; and
[1700] (c) detecting the binding of antibodies present in the biological sample to Ara h 2, or a fragment thereof.
[1701] 42. The method of paragraph 41, where antibody binding is detected using tandem bio-layer interferometry.
[1702] 43. The method of paragraphs 41 or 42, where the antibody from step (b) is bound to a solid support.
[1703] 44. The method of paragraphs 41 or 42, where Ara h 2, or a fragment thereof, is bound to a solid support.
[1704] 45. The method of paragraph 41, where antibody binding is detected using an enzyme-linked immunosorbent assay.

### 24B7D4:

[1705] 1. An isolated antibody that binds to Ara h 2 (conglutin-7), or an antigen-binding fragment thereof, wherein the antibody comprises the following six complementarity determining regions (CDRs):
[1706] (a) an CDR-H1 comprising the amino acid sequence of (SEQ ID NO: 421);
[1707] (b) an CDR-H2 comprising the amino acid sequence of (SEQ ID NO: 422);
[1708] (c) an CDR-H3 comprising the amino acid sequence of (SEQ ID NO: 423);
[1709] (d) an CDR-L1 comprising the amino acid sequence of (SEQ ID NO: 424);
[1710] (e) an CDR-L2 comprising the amino acid sequence of (SEQ ID NO: 425); and
[1711] (f) an CDR-L3 comprising the amino acid sequence of (SEQ ID NO: 426).
[1712] 2. The antibody of paragraph 1, wherein the antibody comprises
[1713] (a) a heavy chain variable (VH) domain comprising an amino sequence having at least 90%, at least 95%, or at least 99% sequence identity to the amino acid sequence of SEQ ID NO: 427;
[1714] (b) a light chain variable (VL) domain comprising an amino acid sequence having at least 90%, at least 95%, or at least 99% identity to the amino acid sequence of SEQ ID NO: 428; or (c) a VH domain as in (a) and a VL domain as in (b).
[1715] 3. The antibody of paragraph 1 or 2, further comprising the following VH domain framework regions (FRs):
[1716] (a) an FR-H1 comprising the amino acid sequence of (SEQ ID NO: 429);
[1717] (b) an FR-H2 comprising the amino acid sequence of (SEQ ID NO: 430);
[1718] (c) an FR-H3 comprising the amino acid sequence of (SEQ ID NO: 431); and
[1719] (d) an FR-H4 comprising the amino acid sequence of (SEQ ID NO: 432).
[1720] 4. The antibody of any one of paragraphs 1-3, wherein the VH domain comprises the amino acid sequence of SEQ ID NO: 427.
[1721] 5. The antibody of any one of paragraphs 1-4, further comprising the following VL domain FRs:
[1722] (a) an FR-L1 comprising the amino acid sequence of (SEQ ID NO: 433);
[1723] (b) an FR-L2 comprising the amino acid sequence of (SEQ ID NO: 434);
[1724] (c) an FR-L3 comprising the amino acid sequence of (SEQ ID NO: 435); and
[1725] (d) an FR-L4 comprising the amino acid sequence of (SEQ ID NO: 436).
[1726] 6. The antibody of any one of paragraphs 1-5, wherein the VL domain comprises the amino acid sequence of SEQ ID NO: 428.
[1727] 7. An isolated antibody that binds to Ara h 2, or an antigen-binding fragment thereof, wherein the antibody comprises
[1728] (a) a VH domain comprising an amino acid sequence having at least 90%, at least 95%, or at least 99% sequence identity to the amino acid sequence of SEQ ID NO: 427 and
[1729] (b) a VL domain comprising an amino acid sequence having at least 90%, at least 95%, or at least 99% sequence identity to the amino acid sequence of SEQ ID NO: 428.
[1730] 8. The antibody of paragraph 7, wherein the antibody comprises a VH domain comprising the amino acid sequence of SEQ ID NO: 427 and a VL domain comprising the amino acid sequence of SEQ ID NO: 428.
[1731] 9. The antibody of any one of paragraphs 1-8, wherein the antibody comprises (a) a heavy chain comprising the amino acid sequence of SEQ ID NO: 437 and (b) a light chain comprising the amino acid sequence of SEQ ID NO: 438.
[1732] 10. The antibody of any one of paragraphs 1-9, wherein the antibody binds Ara h 2 with a KD of about 50 nM or less.
[1733] 11. The method of paragraph 10, wherein the KD is measured by a surface plasmon resonance assay.
[1734] 12. The antibody of paragraph 11, wherein the antibody binds Ara h 2 with a KD of between about 0.1 pM and about 40 nM.
[1735] 13. The antibody of paragraph 12, wherein the antibody binds Ara h 2 with a KD of between about 120 pM and about 20 nM.
[1736] 14. The antibody of paragraph 13, wherein the antibody binds Ara h 2 with a KD of between about 120 pM and about 10 nM.
[1737] 15. The antibody of any one of paragraphs 1-14, wherein the antibody is capable neutralizing Ara h 2
[1738] 16. An antibody that binds to the same epitope as the antibody of any one of paragraph 1-15.
[1739] 17. An antibody that competes for binding to Ara h 2 with, or cross-blocks or is cross-blocked by, the antibody of any one of paragraphs 1-16.
[1740] 18. The antibody of paragraph 16 or 17, wherein whether the antibody binds to the same epitope or competes for binding to Ara h 2 is determined by an epitope binning assay.
[1741] 19. The antibody of any one of paragraphs 1-18, wherein the antibody is monoclonal.
[1742] 20. The antibody of any one of paragraphs 1-19, wherein the antibody is humanized.
[1743] 21. The antibody of any one of paragraphs 1-20, wherein the antibody is an antibody fragment that binds Ara h 2.
[1744] 22. The antibody of paragraph 21, wherein the antibody fragment is selected from the group consisting of Fab, Fab′-SH, Fv, scFv, and (Fab′)2 fragments.
[1745] 23. The antibody of any one of paragraphs 1-22, wherein the antibody is a full-length antibody.
[1746] 24. The antibody of paragraph 23, wherein the antibody is an IgG antibody.
[1747] 25. The antibody of paragraph 24, wherein the IgG antibody is an IgG1 antibody.
[1748] 26. The antibody of paragraph 25, wherein the IgG antibody is an IgG4 antibody.
[1749] 27. The antibody of paragraph 26, wherein the IgG4 antibody comprises an S228P mutation (EU numbering).
[1750] 28. The antibody of any one of paragraphs 1-27, wherein the antibody is a monospecific antibody.
[1751] 29. The antibody of any one of paragraphs 1-28, wherein the antibody is a multispecific antibody.
[1752] 30. The antibody of paragraph 29, wherein the antibody is a bispecific antibody.
[1753] 31. A polynucleotide encoding an isolated antibody of any one of paragraphs 1-30.
[1754] 32. A vector comprising the polynucleotide of paragraph 31.
[1755] 33. A host cell comprising the vector of paragraph 32.
[1756] 34. A method of producing the antibody of any one of paragraphs 1-33, the method comprising culturing a host cell that comprises the vector of paragraph 32 and recovering the antibody.
[1757] 35. The method of paragraph 34, wherein the host cell is prokaryotic.
[1758] 36. The method of paragraph 35, wherein the host cell is Escherichia coli.
[1759] 37. The method of paragraph 34, wherein the host cell is eukaryotic.
[1760] 38. The method of paragraph 37, wherein the host cell is a 293 cell, a CHO cell, a yeast cell, or a plant cell.
[1761] 39. A method for treating a patient who demonstrates a sensitivity to, or an allergic reaction against, a nut or a portion thereof or an extract thereof, or to Ara h 2 protein, or for treating at least one symptom or complication associated with a sensitivity to, or allergic reaction against a nut or a portion thereof or an extract thereof, or to Ara h 2, comprising administering an effective amount of one or more isolated antibodies or antigen-binding fragments thereof that bind specifically to Ara h 2, according to any of paragraphs 1-30.
[1762] 40. The method of paragraph 39, further comprising administering an effective amount of a second therapeutic agent useful for diminishing an allergic reaction an allergic reaction against, a nut or a portion thereof or an extract thereof, or to Ara h 2 protein.
[1763] 41. A method for detecting the presence of Ara h 2 neutralizing antibodies in a biological sample, comprising:
[1764] (a) providing a sample from a subject;
[1765] (b) contacting the sample with a mixture comprising:
   [1766] (i) the antibody of any one of paragraphs 1-30 and
   [1767] (ii) Ara h 2, or a fragment thereof; and
[1768] (c) detecting the binding of antibodies present in the biological sample to Ara h 2, or a fragment thereof.
[1769] 42. The method of paragraph 41, where antibody binding is detected using tandem bio-layer interferometry.
[1770] 43. The method of paragraphs 41 or 42, where the antibody from step (b) is bound to a solid support.
[1771] 44. The method of paragraphs 41 or 42, where Ara h 2, or a fragment thereof, is bound to a solid support.
[1772] 45. The method of paragraph 41, where antibody binding is detected using an enzyme-linked immunosorbent assay.

### T1:

[1773] 1. An isolated antibody that binds to Ara h 2 (conglutin-7), or an antigen-binding fragment thereof, wherein the antibody comprises the following six complementarity determining regions (CDRs):
[1774] (a) an CDR-H1 comprising the amino acid sequence of (SEQ ID NO: 442);
[1775] (b) an CDR-H2 comprising the amino acid sequence of (SEQ ID NO: 443);
[1776] (c) an CDR-H3 comprising the amino acid sequence of (SEQ ID NO: 444);
[1777] (d) an CDR-L1 comprising the amino acid sequence of (SEQ ID NO: 445);
[1778] (e) an CDR-L2 comprising the amino acid sequence of (SEQ ID NO: 446); and
[1779] (f) an CDR-L3 comprising the amino acid sequence of (SEQ ID NO: 447).
[1780] 2. The antibody of paragraph 1, wherein the antibody comprises
[1781] (a) a heavy chain variable (VH) domain comprising an amino sequence having at least 90%, at least 95%, or at least 99% sequence identity to the amino acid sequence of SEQ ID NO: 448;
[1782] (b) a light chain variable (VL) domain comprising an amino acid sequence having at least 90%, at least 95%, or at least 99% identity to the amino acid sequence of SEQ ID NO: 449; or (c) a VH domain as in (a) and a VL domain as in (b).
[1783] 3. The antibody of paragraph 1 or 2, further comprising the following VH domain framework regions (FRs):
[1784] (a) an FR-H1 comprising the amino acid sequence of (SEQ ID NO: 450);
[1785] (b) an FR-H2 comprising the amino acid sequence of (SEQ ID NO: 451);
[1786] (c) an FR-H3 comprising the amino acid sequence of (SEQ ID NO: 452); and
[1787] (d) an FR-H4 comprising the amino acid sequence of (SEQ ID NO: 453).
[1788] 4. The antibody of any one of paragraphs 1-3, wherein the VH domain comprises the amino acid sequence of SEQ ID NO: 448.
[1789] 5. The antibody of any one of paragraphs 1-4, further comprising the following VL domain FRs:
[1790] (a) an FR-L1 comprising the amino acid sequence of (SEQ ID NO: 454);
[1791] (b) an FR-L2 comprising the amino acid sequence of (SEQ ID NO: 455);
[1792] (c) an FR-L3 comprising the amino acid sequence of (SEQ ID NO: 456); and
[1793] (d) an FR-L4 comprising the amino acid sequence of (SEQ ID NO: 457).
[1794] 6. The antibody of any one of paragraphs 1-5, wherein the VL domain comprises the amino acid sequence of SEQ ID NO: 449.
[1795] 7. An isolated antibody that binds to Ara h 2, or an antigen-binding fragment thereof, wherein the antibody comprises
[1796] (a) a VH domain comprising an amino acid sequence having at least 90%, at least 95%, or at least 99% sequence identity to the amino acid sequence of SEQ ID NO: 448 and
[1797] (b) a VL domain comprising an amino acid sequence having at least 90%, at least 95%, or at least 99% sequence identity to the amino acid sequence of SEQ ID NO: 449.
[1798] 8. The antibody of paragraph 7, wherein the antibody comprises a VH domain comprising the amino acid sequence of SEQ ID NO: 448 and a VL domain comprising the amino acid sequence of SEQ ID NO: 449.
[1799] 9. The antibody of any one of paragraphs 1-8, wherein the antibody comprises (a) a heavy chain comprising the amino acid sequence of SEQ ID NO: 458 and (b) a light chain comprising the amino acid sequence of SEQ ID NO: 459.
[1800] 10. The antibody of any one of paragraphs 1-9, wherein the antibody binds Ara h 2 with a KD of about 50 nM or less.
[1801] 11. The method of paragraph 10, wherein the KD is measured by a surface plasmon resonance assay.
[1802] 12. The antibody of paragraph 11, wherein the antibody binds Ara h 2 with a KD of between about 0.1 pM and about 40 nM.
[1803] 13. The antibody of paragraph 12, wherein the antibody binds Ara h 2 with a KD of between about 120 pM and about 20 nM.
[1804] 14. The antibody of paragraph 13, wherein the antibody binds Ara h 2 with a KD of between about 120 pM and about 10 nM.
[1805] 15. The antibody of any one of paragraphs 1-14, wherein the antibody is capable neutralizing Ara h 2
[1806] 16. An antibody that binds to the same epitope as the antibody of any one of paragraph 1-15.
[1807] 17. An antibody that competes for binding to Ara h 2 with, or cross-blocks or is cross-blocked by, the antibody of any one of paragraphs 1-16.
[1808] 18. The antibody of paragraph 16 or 17, wherein whether the antibody binds to the same epitope or competes for binding to Ara h 2 is determined by an epitope binning assay.
[1809] 19. The antibody of any one of paragraphs 1-18, wherein the antibody is monoclonal.
[1810] 20. The antibody of any one of paragraphs 1-19, wherein the antibody is humanized.
[1811] 21. The antibody of any one of paragraphs 1-20, wherein the antibody is an antibody fragment that binds Ara h 2.
[1812] 22. The antibody of paragraph 21, wherein the antibody fragment is selected from the group consisting of Fab, Fab′-SH, Fv, scFv, and (Fab′)2 fragments.
[1813] 23. The antibody of any one of paragraphs 1-22, wherein the antibody is a full-length antibody.
[1814] 24. The antibody of paragraph 23, wherein the antibody is an IgG antibody.
[1815] 25. The antibody of paragraph 24, wherein the IgG antibody is an IgG1 antibody.
[1816] 26. The antibody of paragraph 25, wherein the IgG antibody is an IgG4 antibody.
[1817] 27. The antibody of paragraph 26, wherein the IgG4 antibody comprises an S228P mutation (EU numbering).
[1818] 28. The antibody of any one of paragraphs 1-27, wherein the antibody is a monospecific antibody.
[1819] 29. The antibody of any one of paragraphs 1-28, wherein the antibody is a multispecific antibody.
[1820] 30. The antibody of paragraph 29, wherein the antibody is a bispecific antibody.
[1821] 31. A polynucleotide encoding an isolated antibody of any one of paragraphs 1-30.
[1822] 32. A vector comprising the polynucleotide of paragraph 31.
[1823] 33. A host cell comprising the vector of paragraph 32.
[1824] 34. A method of producing the antibody of any one of paragraphs 1-33, the method comprising culturing a host cell that comprises the vector of paragraph 32 and recovering the antibody.
[1825] 35. The method of paragraph 34, wherein the host cell is prokaryotic.
[1826] 36. The method of paragraph 35, wherein the host cell is Escherichia coli.
[1827] 37. The method of paragraph 34, wherein the host cell is eukaryotic.
[1828] 38. The method of paragraph 37, wherein the host cell is a 293 cell, a CHO cell, a yeast cell, or a plant cell.
[1829] 39. A method for treating a patient who demonstrates a sensitivity to, or an allergic reaction against, a nut or a portion thereof or an extract thereof, or to Ara h 2 protein, or for treating at least one symptom or complication associated with a sensitivity to, or allergic reaction against a nut or a portion thereof or an extract thereof, or to Ara h 2, comprising administering an effective amount of one or more isolated antibodies or antigen-binding fragments thereof that bind specifically to Ara h 2, according to any of paragraphs 1-30.
[1830] 40. The method of paragraph 39, further comprising administering an effective amount of a second therapeutic agent useful for diminishing an allergic reaction an allergic reaction against, a nut or a portion thereof or an extract thereof, or to Ara h 2 protein.
[1831] 41. A method for detecting the presence of Ara h 2 neutralizing antibodies in a biological sample, comprising:
[1832] (a) providing a sample from a subject;
[1833] (b) contacting the sample with a mixture comprising:
   [1834] (i) the antibody of any one of paragraphs 1-30 and
   [1835] (ii) Ara h 2, or a fragment thereof; and
[1836] (c) detecting the binding of antibodies present in the biological sample to Ara h 2, or a fragment thereof.
[1837] 42. The method of paragraph 41, where antibody binding is detected using tandem bio-layer interferometry.
[1838] 43. The method of paragraphs 41 or 42, where the antibody from step (b) is bound to a solid support.
[1839] 44. The method of paragraphs 41 or 42, where Ara h 2, or a fragment thereof, is bound to a solid support.
[1840] 45. The method of paragraph 41, where antibody binding is detected using an enzyme-linked immunosorbent assay.
[1841] 1. An isolated antibody that binds to Ara h 2 (conglutin-7), or an antigen-binding fragment thereof, wherein the antibody comprises the following six complementarity determining regions (CDRs):
[1842] (a) an CDR-H1 comprising the amino acid sequence of (SEQ ID NO: 462);
[1843] (b) an CDR-H2 comprising the amino acid sequence of (SEQ ID NO: 463);
[1844] (c) an CDR-H3 comprising the amino acid sequence of (SEQ ID NO: 464);
[1845] (d) an CDR-L1 comprising the amino acid sequence of (SEQ ID NO: 465);
[1846] (e) an CDR-L2 comprising the amino acid sequence of (SEQ ID NO: 466); and
[1847] (f) an CDR-L3 comprising the amino acid sequence of (SEQ ID NO: 467).
[1848] 2. The antibody of paragraph 1, wherein the antibody comprises
[1849] (a) a heavy chain variable (VH) domain comprising an amino sequence having at least 90%, at least 95%, or at least 99% sequence identity to the amino acid sequence of SEQ ID NO: 468;
[1850] (b) a light chain variable (VL) domain comprising an amino acid sequence having at least 90%, at least 95%, or at least 99% identity to the amino acid sequence of SEQ ID NO: 469; or (c) a VH domain as in (a) and a VL domain as in (b).
[1851] 3. The antibody of paragraph 1 or 2, further comprising the following VH domain framework regions (FRs):
[1852] (a) an FR-H1 comprising the amino acid sequence of (SEQ ID NO: 470);
[1853] (b) an FR-H2 comprising the amino acid sequence of (SEQ ID NO: 471);
[1854] (c) an FR-H3 comprising the amino acid sequence of (SEQ ID NO: 472); and
[1855] (d) an FR-H4 comprising the amino acid sequence of (SEQ ID NO: 473).
[1856] 4. The antibody of any one of paragraphs 1-3, wherein the VH domain comprises the amino acid sequence of SEQ ID NO: 468.
[1857] 5. The antibody of any one of paragraphs 1-4, further comprising the following VL domain FRs:
[1858] (a) an FR-L1 comprising the amino acid sequence of (SEQ ID NO: 474);
[1859] (b) an FR-L2 comprising the amino acid sequence of (SEQ ID NO: 475);
[1860] (c) an FR-L3 comprising the amino acid sequence of (SEQ ID NO: 476); and
[1861] (d) an FR-L4 comprising the amino acid sequence of (SEQ ID NO: 477).
[1862] 6. The antibody of any one of paragraphs 1-5, wherein the VL domain comprises the amino acid sequence of SEQ ID NO: 469.
[1863] 7. An isolated antibody that binds to Ara h 2, or an antigen-binding fragment thereof, wherein the antibody comprises
[1864] (a) a VH domain comprising an amino acid sequence having at least 90%, at least 95%, or at least 99% sequence identity to the amino acid sequence of SEQ ID NO: 468 and
[1865] (b) a VL domain comprising an amino acid sequence having at least 90%, at least 95%, or at least 99% sequence identity to the amino acid sequence of SEQ ID NO: 469.
[1866] 8. The antibody of paragraph 7, wherein the antibody comprises a VH domain comprising the amino acid sequence of SEQ ID NO: 468 and a VL domain comprising the amino acid sequence of SEQ ID NO: 469.
[1867] 9. The antibody of any one of paragraphs 1-8, wherein the antibody comprises (a) a heavy chain comprising the amino acid sequence of SEQ ID NO: 478 and (b) a light chain comprising the amino acid sequence of SEQ ID NO: 479.
[1868] 10. The antibody of any one of paragraphs 1-9, wherein the antibody binds Ara h 2 with a KD of about 50 nM or less.
[1869] 11. The method of paragraph 10, wherein the KD is measured by a surface plasmon resonance assay.
[1870] 12. The antibody of paragraph 11, wherein the antibody binds Ara h 2 with a KD of between about 0.1 pM and about 40 nM.
[1871] 13. The antibody of paragraph 12, wherein the antibody binds Ara h 2 with a KD of between about 120 pM and about 20 nM.
[1872] 14. The antibody of paragraph 13, wherein the antibody binds Ara h 2 with a KD of between about 120 pM and about 10 nM.
[1873] 15. The antibody of any one of paragraphs 1-14, wherein the antibody is capable neutralizing Ara h 2
[1874] 16. An antibody that binds to the same epitope as the antibody of any one of paragraph 1-15.
[1875] 17. An antibody that competes for binding to Ara h 2 with, or cross-blocks or is cross-blocked by, the antibody of any one of paragraphs 1-16.
[1876] 18. The antibody of paragraph 16 or 17, wherein whether the antibody binds to the same epitope or competes for binding to Ara h 2 is determined by an epitope binning assay.
[1877] 19. The antibody of any one of paragraphs 1-18, wherein the antibody is monoclonal.
[1878] 20. The antibody of any one of paragraphs 1-19, wherein the antibody is humanized.
[1879] 21. The antibody of any one of paragraphs 1-20, wherein the antibody is an antibody fragment that binds Ara h 2.
[1880] 22. The antibody of paragraph 21, wherein the antibody fragment is selected from the group consisting of Fab, Fab′-SH, Fv, scFv, and (Fab′)2 fragments.
[1881] 23. The antibody of any one of paragraphs 1-22, wherein the antibody is a full-length antibody.
[1882] 24. The antibody of paragraph 23, wherein the antibody is an IgG antibody.
[1883] 25. The antibody of paragraph 24, wherein the IgG antibody is an IgG1 antibody.
[1884] 26. The antibody of paragraph 25, wherein the IgG antibody is an IgG4 antibody.
[1885] 27. The antibody of paragraph 26, wherein the IgG4 antibody comprises an S228P mutation (EU numbering).
[1886] 28. The antibody of any one of paragraphs 1-27, wherein the antibody is a monospecific antibody.
[1887] 29. The antibody of any one of paragraphs 1-28, wherein the antibody is a multispecific antibody.
[1888] 30. The antibody of paragraph 29, wherein the antibody is a bispecific antibody.
[1889] 31. A polynucleotide encoding an isolated antibody of any one of paragraphs 1-30.
[1890] 32. A vector comprising the polynucleotide of paragraph 31.
[1891] 33. A host cell comprising the vector of paragraph 32.
[1892] 34. A method of producing the antibody of any one of paragraphs 1-33, the method comprising culturing a host cell that comprises the vector of paragraph 32 and recovering the antibody.
[1893] 35. The method of paragraph 34, wherein the host cell is prokaryotic.
[1894] 36. The method of paragraph 35, wherein the host cell is Escherichia coli.
[1895] 37. The method of paragraph 34, wherein the host cell is eukaryotic.
[1896] 38. The method of paragraph 37, wherein the host cell is a 293 cell, a CHO cell, a yeast cell, or a plant cell.
[1897] 39. A method for treating a patient who demonstrates a sensitivity to, or an allergic reaction against, a nut or a portion thereof or an extract thereof, or to Ara h 2 protein, or for treating at least one symptom or complication associated with a sensitivity to, or allergic reaction against a nut or a portion thereof or an extract thereof, or to Ara h 2, comprising administering an effective amount of one or more isolated antibodies or antigen-binding fragments thereof that bind specifically to Ara h 2, according to any of paragraphs 1-30.
[1898] 40. The method of paragraph 39, further comprising administering an effective amount of a second therapeutic agent useful for diminishing an allergic reaction an allergic reaction against, a nut or a portion thereof or an extract thereof, or to Ara h 2 protein.
[1899] 41. A method for detecting the presence of Ara h 2 neutralizing antibodies in a biological sample, comprising:
[1900] (a) providing a sample from a subject;
[1901] (b) contacting the sample with a mixture comprising:
   [1902] (i) the antibody of any one of paragraphs 1-30 and
   [1903] (ii) Ara h 2, or a fragment thereof; and
[1904] (c) detecting the binding of antibodies present in the biological sample to Ara h 2, or a fragment thereof.
[1905] 42. The method of paragraph 41, where antibody binding is detected using tandem bio-layer interferometry.
[1906] 43. The method of paragraphs 41 or 42, where the antibody from step (b) is bound to a solid support.
[1907] 44. The method of paragraphs 41 or 42, where Ara h 2, or a fragment thereof, is bound to a solid support.
[1908] 45. The method of paragraph 41, where antibody binding is detected using an enzyme-linked immunosorbent assay.

### T4:

[1909] 1. An isolated antibody that binds to Ara h 2 (conglutin-7), or an antigen-binding fragment thereof, wherein the antibody comprises the following six complementarity determining regions (CDRs):
[1910] (a) an CDR-H1 comprising the amino acid sequence of (SEQ ID NO: 482);
[1911] (b) an CDR-H2 comprising the amino acid sequence of (SEQ ID NO: 483);
[1912] (c) an CDR-H3 comprising the amino acid sequence of (SEQ ID NO: 484);
[1913] (d) an CDR-L1 comprising the amino acid sequence of (SEQ ID NO: 485);
[1914] (e) an CDR-L2 comprising the amino acid sequence of (SEQ ID NO: 486); and
[1915] (f) an CDR-L3 comprising the amino acid sequence of (SEQ ID NO: 487).
[1916] 2. The antibody of paragraph 1, wherein the antibody comprises
[1917] (a) a heavy chain variable (VH) domain comprising an amino sequence having at least 90%, at least 95%, or at least 99% sequence identity to the amino acid sequence of SEQ ID NO: 488;
[1918] (b) a light chain variable (VL) domain comprising an amino acid sequence having at least 90%, at least 95%, or at least 99% identity to the amino acid sequence of SEQ ID NO: 489; or (c) a VH domain as in (a) and a VL domain as in (b).
[1919] 3. The antibody of paragraph 1 or 2, further comprising the following VH domain framework regions (FRs):
[1920] (a) an FR-H1 comprising the amino acid sequence of (SEQ ID NO: 490);
[1921] (b) an FR-H2 comprising the amino acid sequence of (SEQ ID NO: 491);
[1922] (c) an FR-H3 comprising the amino acid sequence of (SEQ ID NO: 492); and
[1923] (d) an FR-H4 comprising the amino acid sequence of (SEQ ID NO: 493).
[1924] 4. The antibody of any one of paragraphs 1-3, wherein the VH domain comprises the amino acid sequence of SEQ ID NO: 488.
[1925] 5. The antibody of any one of paragraphs 1-4, further comprising the following VL domain FRs:
[1926] (a) an FR-L1 comprising the amino acid sequence of (SEQ ID NO: 494);
[1927] (b) an FR-L2 comprising the amino acid sequence of (SEQ ID NO: 495);
[1928] (c) an FR-L3 comprising the amino acid sequence of (SEQ ID NO: 496); and
[1929] (d) an FR-L4 comprising the amino acid sequence of (SEQ ID NO: 497).
[1930] 6. The antibody of any one of paragraphs 1-5, wherein the VL domain comprises the amino acid sequence of SEQ ID NO: 489.
[1931] 7. An isolated antibody that binds to Ara h 2, or an antigen-binding fragment thereof, wherein the antibody comprises
[1932] (a) a VH domain comprising an amino acid sequence having at least 90%, at least 95%, or at least 99% sequence identity to the amino acid sequence of SEQ ID NO: 488 and
[1933] (b) a VL domain comprising an amino acid sequence having at least 90%, at least 95%, or at least 99% sequence identity to the amino acid sequence of SEQ ID NO: 489.
[1934] 8. The antibody of paragraph 7, wherein the antibody comprises a VH domain comprising the amino acid sequence of SEQ ID NO: 488 and a VL domain comprising the amino acid sequence of SEQ ID NO: 489.
[1935] 9. The antibody of any one of paragraphs 1-8, wherein the antibody comprises (a) a heavy chain comprising the amino acid sequence of SEQ ID NO: 498 and (b) a light chain comprising the amino acid sequence of SEQ ID NO: 499.
[1936] 10. The antibody of any one of paragraphs 1-9, wherein the antibody binds Ara h 2 with a KD of about 50 nM or less.
[1937] 11. The method of paragraph 10, wherein the KD is measured by a surface plasmon resonance assay.
[1938] 12. The antibody of paragraph 11, wherein the antibody binds Ara h 2 with a KD of between about 0.1 pM and about 40 nM.
[1939] 13. The antibody of paragraph 12, wherein the antibody binds Ara h 2 with a KD of between about 120 pM and about 20 nM.
[1940] 14. The antibody of paragraph 13, wherein the antibody binds Ara h 2 with a KD of between about 120 pM and about 10 nM.
[1941] 15. The antibody of any one of paragraphs 1-14, wherein the antibody is capable neutralizing Ara h 2
[1942] 16. An antibody that binds to the same epitope as the antibody of any one of paragraph 1-15.
[1943] 17. An antibody that competes for binding to Ara h 2 with, or cross-blocks or is cross-blocked by, the antibody of any one of paragraphs 1-16.
[1944] 18. The antibody of paragraph 16 or 17, wherein whether the antibody binds to the same epitope or competes for binding to Ara h 2 is determined by an epitope binning assay.
[1945] 19. The antibody of any one of paragraphs 1-18, wherein the antibody is monoclonal.
[1946] 20. The antibody of any one of paragraphs 1-19, wherein the antibody is humanized.
[1947] 21. The antibody of any one of paragraphs 1-20, wherein the antibody is an antibody fragment that binds Ara h 2.
[1948] 22. The antibody of paragraph 21, wherein the antibody fragment is selected from the group consisting of Fab, Fab′-SH, Fv, scFv, and (Fab′)2 fragments.
[1949] 23. The antibody of any one of paragraphs 1-22, wherein the antibody is a full-length antibody.
[1950] 24. The antibody of paragraph 23, wherein the antibody is an IgG antibody.
[1951] 25. The antibody of paragraph 24, wherein the IgG antibody is an IgG1 antibody.
[1952] 26. The antibody of paragraph 25, wherein the IgG antibody is an IgG4 antibody.
[1953] 27. The antibody of paragraph 26, wherein the IgG4 antibody comprises an S228P mutation (EU numbering).
[1954] 28. The antibody of any one of paragraphs 1-27, wherein the antibody is a monospecific antibody.
[1955] 29. The antibody of any one of paragraphs 1-28, wherein the antibody is a multispecific antibody.
[1956] 30. The antibody of paragraph 29, wherein the antibody is a bispecific antibody.
[1957] 31. A polynucleotide encoding an isolated antibody of any one of paragraphs 1-30.
[1958] 32. A vector comprising the polynucleotide of paragraph 31.
[1959] 33. A host cell comprising the vector of paragraph 32.
[1960] 34. A method of producing the antibody of any one of paragraphs 1-33, the method comprising culturing a host cell that comprises the vector of paragraph 32 and recovering the antibody.
[1961] 35. The method of paragraph 34, wherein the host cell is prokaryotic.
[1962] 36. The method of paragraph 35, wherein the host cell is Escherichia coli.
[1963] 37. The method of paragraph 34, wherein the host cell is eukaryotic.
[1964] 38. The method of paragraph 37, wherein the host cell is a 293 cell, a CHO cell, a yeast cell, or a plant cell.
[1965] 39. A method for treating a patient who demonstrates a sensitivity to, or an allergic reaction against, a nut or a portion thereof or an extract thereof, or to Ara h 2 protein, or for treating at least one symptom or complication associated with a sensitivity to, or allergic reaction against a nut or a portion thereof or an extract thereof, or to Ara h 2, comprising administering an effective amount of one or more isolated antibodies or antigen-binding fragments thereof that bind specifically to Ara h 2, according to any of paragraphs 1-30.
[1966] 40. The method of paragraph 39, further comprising administering an effective amount of a second therapeutic agent useful for diminishing an allergic reaction an allergic reaction against, a nut or a portion thereof or an extract thereof, or to Ara h 2 protein.
[1967] 41. A method for detecting the presence of Ara h 2 neutralizing antibodies in a biological sample, comprising:
[1968] (a) providing a sample from a subject;
[1969] (b) contacting the sample with a mixture comprising:
   [1970] (i) the antibody of any one of paragraphs 1-30 and
   [1971] (ii) Ara h 2, or a fragment thereof; and
[1972] (c) detecting the binding of antibodies present in the biological sample to Ara h 2, or a fragment thereof.
[1973] 42. The method of paragraph 41, where antibody binding is detected using tandem bio-layer interferometry.
[1974] 43. The method of paragraphs 41 or 42, where the antibody from step (b) is bound to a solid support.
[1975] 44. The method of paragraphs 41 or 42, where Ara h 2, or a fragment thereof, is bound to a solid support.
[1976] 45. The method of paragraph 41, where antibody binding is detected using an enzyme-linked immunosorbent assay.

### T5:

[1977] 1. An isolated antibody that binds to Ara h 2 (conglutin-7), or an antigen-binding fragment thereof, wherein the antibody comprises the following six complementarity determining regions (CDRs):
[1978] (a) an CDR-H1 comprising the amino acid sequence of (SEQ ID NO: 502);
[1979] (b) an CDR-H2 comprising the amino acid sequence of (SEQ ID NO: 503);
[1980] (c) an CDR-H3 comprising the amino acid sequence of (SEQ ID NO: 504);
[1981] (d) an CDR-L1 comprising the amino acid sequence of (SEQ ID NO: 505);
[1982] (e) an CDR-L2 comprising the amino acid sequence of (SEQ ID NO: 506); and
[1983] (f) an CDR-L3 comprising the amino acid sequence of (SEQ ID NO: 507).
[1984] 2. The antibody of paragraph 1, wherein the antibody comprises
[1985] (a) a heavy chain variable (VH) domain comprising an amino sequence having at least 90%, at least 95%, or at least 99% sequence identity to the amino acid sequence of SEQ ID NO: 508;
[1986] (b) a light chain variable (VL) domain comprising an amino acid sequence having at least 90%, at least 95%, or at least 99% identity to the amino acid sequence of SEQ ID NO: 509; or (c) a VH domain as in (a) and a VL domain as in (b).
[1987] 3. The antibody of paragraph 1 or 2, further comprising the following VH domain framework regions (FRs):
[1988] (a) an FR-H1 comprising the amino acid sequence of (SEQ ID NO: 510);
[1989] (b) an FR-H2 comprising the amino acid sequence of (SEQ ID NO: 511);
[1990] (c) an FR-H3 comprising the amino acid sequence of (SEQ ID NO: 512); and
[1991] (d) an FR-H4 comprising the amino acid sequence of (SEQ ID NO: 513).
[1992] 4. The antibody of any one of paragraphs 1-3, wherein the VH domain comprises the amino acid sequence of SEQ ID NO: 508.
[1993] 5. The antibody of any one of paragraphs 1-4, further comprising the following VL domain FRs:
[1994] (a) an FR-L1 comprising the amino acid sequence of (SEQ ID NO: 514);
[1995] (b) an FR-L2 comprising the amino acid sequence of (SEQ ID NO: 515);
[1996] (c) an FR-L3 comprising the amino acid sequence of (SEQ ID NO: 516); and
[1997] (d) an FR-L4 comprising the amino acid sequence of (SEQ ID NO: 517).
[1998] 6. The antibody of any one of paragraphs 1-5, wherein the VL domain comprises the amino acid sequence of SEQ ID NO: 509.
[1999] 7. An isolated antibody that binds to Ara h 2, or an antigen-binding fragment thereof, wherein the antibody comprises
[2000] (a) a VH domain comprising an amino acid sequence having at least 90%, at least 95%, or at least 99% sequence identity to the amino acid sequence of SEQ ID NO: 508 and
[2001] (b) a VL domain comprising an amino acid sequence having at least 90%, at least 95%, or at least 99% sequence identity to the amino acid sequence of SEQ ID NO: 509.
[2002] 8. The antibody of paragraph 7, wherein the antibody comprises a VH domain comprising the amino acid sequence of SEQ ID NO: 508 and a VL domain comprising the amino acid sequence of SEQ ID NO: 509.
[2003] 9. The antibody of any one of paragraphs 1-8, wherein the antibody comprises (a) a heavy chain comprising the amino acid sequence of SEQ ID NO: 518 and (b) a light chain comprising the amino acid sequence of SEQ ID NO: 519.
[2004] 10. The antibody of any one of paragraphs 1-9, wherein the antibody binds Ara h 2 with a KD of about 50 nM or less.
[2005] 11. The method of paragraph 10, wherein the KD is measured by a surface plasmon resonance assay.
[2006] 12. The antibody of paragraph 11, wherein the antibody binds Ara h 2 with a KD of between about 0.1 pM and about 40 nM.
[2007] 13. The antibody of paragraph 12, wherein the antibody binds Ara h 2 with a KD of between about 120 pM and about 20 nM.
[2008] 14. The antibody of paragraph 13, wherein the antibody binds Ara h 2 with a KD of between about 120 pM and about 10 nM.
[2009] 15. The antibody of any one of paragraphs 1-14, wherein the antibody is capable neutralizing Ara h 2
[2010] 16. An antibody that binds to the same epitope as the antibody of any one of paragraph 1-15.
[2011] 17. An antibody that competes for binding to Ara h 2 with, or cross-blocks or is cross-blocked by, the antibody of any one of paragraphs 1-16.
[2012] 18. The antibody of paragraph 16 or 17, wherein whether the antibody binds to the same epitope or competes for binding to Ara h 2 is determined by an epitope binning assay.
[2013] 19. The antibody of any one of paragraphs 1-18, wherein the antibody is monoclonal.
[2014] 20. The antibody of any one of paragraphs 1-19, wherein the antibody is humanized.
[2015] 21. The antibody of any one of paragraphs 1-20, wherein the antibody is an antibody fragment that binds Ara h 2.
[2016] 22. The antibody of paragraph 21, wherein the antibody fragment is selected from the group consisting of Fab, Fab′-SH, Fv, scFv, and (Fab′)2 fragments.
[2017] 23. The antibody of any one of paragraphs 1-22, wherein the antibody is a full-length antibody.
[2018] 24. The antibody of paragraph 23, wherein the antibody is an IgG antibody.
[2019] 25. The antibody of paragraph 24, wherein the IgG antibody is an IgG1 antibody.
[2020] 26. The antibody of paragraph 25, wherein the IgG antibody is an IgG4 antibody.
[2021] 27. The antibody of paragraph 26, wherein the IgG4 antibody comprises an S228P mutation (EU numbering).
[2022] 28. The antibody of any one of paragraphs 1-27, wherein the antibody is a monospecific antibody.
[2023] 29. The antibody of any one of paragraphs 1-28, wherein the antibody is a multispecific antibody.
[2024] 30. The antibody of paragraph 29, wherein the antibody is a bispecific antibody.
[2025] 31. A polynucleotide encoding an isolated antibody of any one of paragraphs 1-30.
[2026] 32. A vector comprising the polynucleotide of paragraph 31.
[2027] 33. A host cell comprising the vector of paragraph 32.
[2028] 34. A method of producing the antibody of any one of paragraphs 1-33, the method comprising culturing a host cell that comprises the vector of paragraph 32 and recovering the antibody.
[2029] 35. The method of paragraph 34, wherein the host cell is prokaryotic.
[2030] 36. The method of paragraph 35, wherein the host cell is Escherichia coli.
[2031] 37. The method of paragraph 34, wherein the host cell is eukaryotic.
[2032] 38. The method of paragraph 37, wherein the host cell is a 293 cell, a CHO cell, a yeast cell, or a plant cell.
[2033] 39. A method for treating a patient who demonstrates a sensitivity to, or an allergic reaction against, a nut or a portion thereof or an extract thereof, or to Ara h 2 protein, or for treating at least one symptom or complication associated with a sensitivity to, or allergic reaction against a nut or a portion thereof or an extract thereof, or to Ara h 2, comprising administering an effective amount of one or more isolated antibodies or antigen-binding fragments thereof that bind specifically to Ara h 2, according to any of paragraphs 1-30.
[2034] 40. The method of paragraph 39, further comprising administering an effective amount of a second therapeutic agent useful for diminishing an allergic reaction an allergic reaction against, a nut or a portion thereof or an extract thereof, or to Ara h 2 protein.
[2035] 41. A method for detecting the presence of Ara h 2 neutralizing antibodies in a biological sample, comprising:
[2036] (a) providing a sample from a subject;
[2037] (b) contacting the sample with a mixture comprising:
   [2038] (i) the antibody of any one of paragraphs 1-30 and
   [2039] (ii) Ara h 2, or a fragment thereof; and
[2040] (c) detecting the binding of antibodies present in the biological sample to Ara h 2, or a fragment thereof.
[2041] 42. The method of paragraph 41, where antibody binding is detected using tandem bio-layer interferometry.
[2042] 43. The method of paragraphs 41 or 42, where the antibody from step (b) is bound to a solid support.
[2043] 44. The method of paragraphs 41 or 42, where Ara h 2, or a fragment thereof, is bound to a solid support.
[2044] 45. The method of paragraph 41, where antibody binding is detected using an enzyme-linked immunosorbent assay.

### 13FU1P1A4:

[2045] 1. An isolated antibody that binds to Ara h 2 (conglutin-7), or an antigen-binding fragment thereof, wherein the antibody comprises the following six complementarity determining regions (CDRs):
[2046] (a) an CDR-H1 comprising the amino acid sequence of (SEQ ID NO: 700);
[2047] (b) an CDR-H2 comprising the amino acid sequence of (SEQ ID NO: 701);
[2048] (c) an CDR-H3 comprising the amino acid sequence of (SEQ ID NO: 702);
[2049] (d) an CDR-L1 comprising the amino acid sequence of (SEQ ID NO: 703);
[2050] (e) an CDR-L2 comprising the amino acid sequence of (SEQ ID NO: 704); and
[2051] (f) an CDR-L3 comprising the amino acid sequence of (SEQ ID NO: 705).
[2052] 2. The antibody of paragraph 1, wherein the antibody comprises
[2053] (a) a heavy chain variable (VH) domain comprising an amino sequence having at least 90%, at least 95%, or at least 99% sequence identity to the amino acid sequence of SEQ ID NO: 706;
[2054] (b) a light chain variable (VL) domain comprising an amino acid sequence having at least 90%, at least 95%, or at least 99% identity to the amino acid sequence of SEQ ID NO: 707; or (c) a VH domain as in (a) and a VL domain as in (b).
[2055] 3. The antibody of paragraph 1 or 2, further comprising the following VH domain framework regions (FRs):
[2056] (a) an FR-H1 comprising the amino acid sequence of (SEQ ID NO: 708);
[2057] (b) an FR-H2 comprising the amino acid sequence of (SEQ ID NO: 709);
[2058] (c) an FR-H3 comprising the amino acid sequence of (SEQ ID NO: 710); and
[2059] (d) an FR-H4 comprising the amino acid sequence of (SEQ ID NO: 711).
[2060] 4. The antibody of any one of paragraphs 1-3, wherein the VH domain comprises the amino acid sequence of SEQ ID NO: 706.
[2061] 5. The antibody of any one of paragraphs 1-4, further comprising the following VL domain FRs:
[2062] (a) an FR-L1 comprising the amino acid sequence of (SEQ ID NO: 712);
[2063] (b) an FR-L2 comprising the amino acid sequence of (SEQ ID NO: 713);
[2064] (c) an FR-L3 comprising the amino acid sequence of (SEQ ID NO: 714); and
[2065] (d) an FR-L4 comprising the amino acid sequence of (SEQ ID NO: 715).
[2066] 6. The antibody of any one of paragraphs 1-5, wherein the VL domain comprises the amino acid sequence of SEQ ID NO: 707.
[2067] 7. An isolated antibody that binds to Ara h 2, or an antigen-binding fragment thereof, wherein the antibody comprises
[2068] (a) a VH domain comprising an amino acid sequence having at least 90%, at least 95%, or at least 99% sequence identity to the amino acid sequence of SEQ ID NO: 706 and
[2069] (b) a VL domain comprising an amino acid sequence having at least 90%, at least 95%, or at least 99% sequence identity to the amino acid sequence of SEQ ID NO: 707.
[2070] 8. The antibody of paragraph 7, wherein the antibody comprises a VH domain comprising the amino acid sequence of SEQ ID NO: 706 and a VL domain comprising the amino acid sequence of SEQ ID NO: 707.
[2071] 9. The antibody of any one of paragraphs 1-8, wherein the antibody comprises (a) a heavy chain comprising the amino acid sequence of SEQ ID NO: 716 and (b) a light chain comprising the amino acid sequence of SEQ ID NO: 717.
[2072] 10. The antibody of any one of paragraphs 1-9, wherein the antibody binds Ara h 2 with a K_{D} of about 50 nM or less.
[2073] 11. The method of paragraph 10, wherein the K_{D} is measured by a surface plasmon resonance assay.
[2074] 12. The antibody of paragraph 11, wherein the antibody binds Ara h 2 with a K_{D} of between about 0.1 pM and about 40 nM.
[2075] 13. The antibody of paragraph 12, wherein the antibody binds Ara h 2 with a K_{D} of between about 120 pM and about 20 nM.
[2076] 14. The antibody of paragraph 13, wherein the antibody binds Ara h 2 with a K_{D} of between about 120 pM and about 10 nM.
[2077] 15. The antibody of any one of paragraphs 1-14, wherein the antibody is capable neutralizing Ara h 2
[2078] 16. An antibody that binds to the same epitope as the antibody of any one of paragraph 1-15.
[2079] 17. An antibody that competes for binding to Ara h 2 with, or cross-blocks or is cross-blocked by, the antibody of any one of paragraphs 1-16.
[2080] 18. The antibody of paragraph 16 or 17, wherein whether the antibody binds to the same epitope or competes for binding to Ara h 2 is determined by an epitope binning assay.
[2081] 19. The antibody of any one of paragraphs 1-18, wherein the antibody is monoclonal.
[2082] 20. The antibody of any one of paragraphs 1-19, wherein the antibody is humanized.
[2083] 21. The antibody of any one of paragraphs 1-20, wherein the antibody is an antibody fragment that binds Ara h 2.
[2084] 22. The antibody of paragraph 21, wherein the antibody fragment is selected from the group consisting of Fab, Fab′-SH, Fv, scFv, and (Fab′)₂ fragments.
[2085] 23. The antibody of any one of paragraphs 1-22, wherein the antibody is a full-length antibody.
[2086] 24. The antibody of paragraph 23, wherein the antibody is an IgG antibody.
[2087] 25. The antibody of paragraph 24, wherein the IgG antibody is an IgG1 antibody.
[2088] 26. The antibody of paragraph 25, wherein the IgG antibody is an IgG4 antibody.
[2089] 27. The antibody of paragraph 26, wherein the IgG4 antibody comprises an S228P mutation (EU numbering).
[2090] 28. The antibody of any one of paragraphs 1-27, wherein the antibody is a monospecific antibody.
[2091] 29. The antibody of any one of paragraphs 1-28, wherein the antibody is a multispecific antibody.
[2092] 30. The antibody of paragraph 29, wherein the antibody is a bispecific antibody.
[2093] 31. A polynucleotide encoding an isolated antibody of any one of paragraphs 1-30.
[2094] 32. A vector comprising the polynucleotide of paragraph 31.
[2095] 33. A host cell comprising the vector of paragraph 32.
[2096] 34. A method of producing the antibody of any one of paragraphs 1-33, the method comprising culturing a host cell that comprises the vector of paragraph 32 and recovering the antibody.
[2097] 35. The method of paragraph 34, wherein the host cell is prokaryotic.
[2098] 36. The method of paragraph 35, wherein the host cell is Escherichia coli.
[2099] 37. The method of paragraph 34, wherein the host cell is eukaryotic.
[2100] 38. The method of paragraph 37, wherein the host cell is a 293 cell, a CHO cell, a yeast cell, or a plant cell.
[2101] 39. A method for treating a patient who demonstrates a sensitivity to, or an allergic reaction against, a nut or a portion thereof or an extract thereof, or to Ara h 2 protein, or for treating at least one symptom or complication associated with a sensitivity to, or allergic reaction against a nut or a portion thereof or an extract thereof, or to Ara h 2, comprising administering an effective amount of one or more isolated antibodies or antigen-binding fragments thereof that bind specifically to Ara h 2, according to any of paragraphs 1-30.
[2102] 40. The method of paragraph 39, further comprising administering an effective amount of a second therapeutic agent useful for diminishing an allergic reaction an allergic reaction against, a nut or a portion thereof or an extract thereof, or to Ara h 2 protein.
[2103] 41. A method for detecting the presence of Ara h 2 neutralizing antibodies in a biological sample, comprising:
[2104] (a) providing a sample from a subject;
[2105] (b) contacting the sample with a mixture comprising:
   [2106] (i) the antibody of any one of paragraphs 1-30 and
   [2107] (ii) Ara h 2, or a fragment thereof; and
[2108] (c) detecting the binding of antibodies present in the biological sample to Ara h 2, or a fragment thereof.
[2109] 42. The method of paragraph 41, where antibody binding is detected using tandem bio-layer interferometry.
[2110] 43. The method of paragraphs 41 or 42, where the antibody from step (b) is bound to a solid support.
[2111] 44. The method of paragraphs 41 or 42, where Ara h 2, or a fragment thereof, is bound to a solid support.
[2112] 45. The method of paragraph 41, where antibody binding is detected using an enzyme-linked immunosorbent assay.

### 13FU1P1B4:

[2113] 1. An isolated antibody that binds to Ara h 2 (conglutin-7), or an antigen-binding fragment thereof, wherein the antibody comprises the following six complementarity determining regions (CDRs):
[2114] (a) an CDR-H1 comprising the amino acid sequence of (SEQ ID NO: 1840);
[2115] (b) an CDR-H2 comprising the amino acid sequence of (SEQ ID NO: 1841);
[2116] (c) an CDR-H3 comprising the amino acid sequence of (SEQ ID NO: 1842);
[2117] (d) an CDR-L1 comprising the amino acid sequence of (SEQ ID NO: 1843);
[2118] (e) an CDR-L2 comprising the amino acid sequence of (SEQ ID NO: 1844); and
[2119] (f) an CDR-L3 comprising the amino acid sequence of (SEQ ID NO: 1845).
[2120] 2. The antibody of paragraph 1, wherein the antibody comprises
[2121] (a) a heavy chain variable (VH) domain comprising an amino sequence having at least 90%, at least 95%, or at least 99% sequence identity to the amino acid sequence of SEQ ID NO: 1846;
[2122] (b) a light chain variable (VL) domain comprising an amino acid sequence having at least 90%, at least 95%, or at least 99% identity to the amino acid sequence of SEQ ID NO: 1847; or (c) a VH domain as in (a) and a VL domain as in (b).
[2123] 3. The antibody of paragraph 1 or 2, further comprising the following VH domain framework regions (FRs):
[2124] (a) an FR-H1 comprising the amino acid sequence of (SEQ ID NO: 1848);
[2125] (b) an FR-H2 comprising the amino acid sequence of (SEQ ID NO: 1849);
[2126] (c) an FR-H3 comprising the amino acid sequence of (SEQ ID NO: 1850); and
[2127] (d) an FR-H4 comprising the amino acid sequence of (SEQ ID NO: 1851).
[2128] 4. The antibody of any one of paragraphs 1-3, wherein the VH domain comprises the amino acid sequence of SEQ ID NO: 1846.
[2129] 5. The antibody of any one of paragraphs 1-4, further comprising the following VL domain FRs:
[2130] (a) an FR-L1 comprising the amino acid sequence of (SEQ ID NO: 1852);
[2131] (b) an FR-L2 comprising the amino acid sequence of (SEQ ID NO: 1853);
[2132] (c) an FR-L3 comprising the amino acid sequence of (SEQ ID NO: 1854); and
[2133] (d) an FR-L4 comprising the amino acid sequence of (SEQ ID NO: 1855).
[2134] 6. The antibody of any one of paragraphs 1-5, wherein the VL domain comprises the amino acid sequence of SEQ ID NO: 1847.
[2135] 7. An isolated antibody that binds to Ara h 2, or an antigen-binding fragment thereof, wherein the antibody comprises
[2136] (a) a VH domain comprising an amino acid sequence having at least 90%, at least 95%, or at least 99% sequence identity to the amino acid sequence of SEQ ID NO: 1846 and
[2137] (b) a VL domain comprising an amino acid sequence having at least 90%, at least 95%, or at least 99% sequence identity to the amino acid sequence of SEQ ID NO: 1847.
[2138] 8. The antibody of paragraph 7, wherein the antibody comprises a VH domain comprising the amino acid sequence of SEQ ID NO: 1846 and a VL domain comprising the amino acid sequence of SEQ ID NO: 1847.
[2139] 9. The antibody of any one of paragraphs 1-8, wherein the antibody comprises (a) a heavy chain comprising the amino acid sequence of SEQ ID NO: 1856 and (b) a light chain comprising the amino acid sequence of SEQ ID NO: 1857.
[2140] 10. The antibody of any one of paragraphs 1-9, wherein the antibody binds Ara h 2 with a K_{D} of about 50 nM or less.
[2141] 11. The method of paragraph 10, wherein the K_{D} is measured by a surface plasmon resonance assay.
[2142] 12. The antibody of paragraph 11, wherein the antibody binds Ara h 2 with a K_{D} of between about 0.1 pM and about 40 nM.
[2143] 13. The antibody of paragraph 12, wherein the antibody binds Ara h 2 with a K_{D} of between about 120 pM and about 20 nM.
[2144] 14. The antibody of paragraph 13, wherein the antibody binds Ara h 2 with a K_{D} of between about 120 pM and about 10 nM.
[2145] 15. The antibody of any one of paragraphs 1-14, wherein the antibody is capable neutralizing Ara h 2
[2146] 16. An antibody that binds to the same epitope as the antibody of any one of paragraph 1-15.
[2147] 17. An antibody that competes for binding to Ara h 2 with, or cross-blocks or is cross-blocked by, the antibody of any one of paragraphs 1-16.
[2148] 18. The antibody of paragraph 16 or 17, wherein whether the antibody binds to the same epitope or competes for binding to Ara h 2 is determined by an epitope binning assay.
[2149] 19. The antibody of any one of paragraphs 1-18, wherein the antibody is monoclonal.
[2150] 20. The antibody of any one of paragraphs 1-19, wherein the antibody is humanized.
[2151] 21. The antibody of any one of paragraphs 1-20, wherein the antibody is an antibody fragment that binds Ara h 2.
[2152] 22. The antibody of paragraph 21, wherein the antibody fragment is selected from the group consisting of Fab, Fab′-SH, Fv, scFv, and (Fab′)2 fragments.
[2153] 23. The antibody of any one of paragraphs 1-22, wherein the antibody is a full-length antibody.
[2154] 24. The antibody of paragraph 23, wherein the antibody is an IgG antibody.
[2155] 25. The antibody of paragraph 24, wherein the IgG antibody is an IgG1 antibody.
[2156] 26. The antibody of paragraph 25, wherein the IgG antibody is an IgG4 antibody.
[2157] 27. The antibody of paragraph 26, wherein the IgG4 antibody comprises an S228P mutation (EU numbering).
[2158] 28. The antibody of any one of paragraphs 1-27, wherein the antibody is a monospecific antibody.
[2159] 29. The antibody of any one of paragraphs 1-28, wherein the antibody is a multispecific antibody.
[2160] 30. The antibody of paragraph 29, wherein the antibody is a bispecific antibody.
[2161] 31. A polynucleotide encoding an isolated antibody of any one of paragraphs 1-30.
[2162] 32. A vector comprising the polynucleotide of paragraph 31.
[2163] 33. A host cell comprising the vector of paragraph 32.
[2164] 34. A method of producing the antibody of any one of paragraphs 1-33, the method comprising culturing a host cell that comprises the vector of paragraph 32 and recovering the antibody.
[2165] 35. The method of paragraph 34, wherein the host cell is prokaryotic.
[2166] 36. The method of paragraph 35, wherein the host cell is Escherichia coli.
[2167] 37. The method of paragraph 34, wherein the host cell is eukaryotic.
[2168] 38. The method of paragraph 37, wherein the host cell is a 293 cell, a CHO cell, a yeast cell, or a plant cell.
[2169] 39. A method for treating a patient who demonstrates a sensitivity to, or an allergic reaction against, a nut or a portion thereof or an extract thereof, or to Ara h 2 protein, or for treating at least one symptom or complication associated with a sensitivity to, or allergic reaction against a nut or a portion thereof or an extract thereof, or to Ara h 2, comprising administering an effective amount of one or more isolated antibodies or antigen-binding fragments thereof that bind specifically to Ara h 2, according to any of paragraphs 1-30.
[2170] 40. The method of paragraph 39, further comprising administering an effective amount of a second therapeutic agent useful for diminishing an allergic reaction an allergic reaction against, a nut or a portion thereof or an extract thereof, or to Ara h 2 protein.
[2171] 41. A method for detecting the presence of Ara h 2 neutralizing antibodies in a biological sample, comprising:
[2172] (a) providing a sample from a subject;
[2173] (b) contacting the sample with a mixture comprising:
   [2174] (i) the antibody of any one of paragraphs 1-30 and
   [2175] (ii) Ara h 2, or a fragment thereof; and
[2176] (c) detecting the binding of antibodies present in the biological sample to Ara h 2, or a fragment thereof.
[2177] 42. The method of paragraph 41, where antibody binding is detected using tandem bio-layer interferometry.
[2178] 43. The method of paragraphs 41 or 42, where the antibody from step (b) is bound to a solid support.
[2179] 44. The method of paragraphs 41 or 42, where Ara h 2, or a fragment thereof, is bound to a solid support.
[2180] 45. The method of paragraph 41, where antibody binding is detected using an enzyme-linked immunosorbent assay.

### 15FU1P3A1:

[2181] 1. An isolated antibody that binds to Ara h 2 (conglutin-7), or an antigen-binding fragment thereof, wherein the antibody comprises the following six complementarity determining regions (CDRs):
[2182] (a) an CDR-H1 comprising the amino acid sequence of (SEQ ID NO: 840);
[2183] (b) an CDR-H2 comprising the amino acid sequence of (SEQ ID NO: 841);
[2184] (c) an CDR-H3 comprising the amino acid sequence of (SEQ ID NO: 842);
[2185] (d) an CDR-L1 comprising the amino acid sequence of (SEQ ID NO: 843);
[2186] (e) an CDR-L2 comprising the amino acid sequence of (SEQ ID NO: 844); and
[2187] (f) an CDR-L3 comprising the amino acid sequence of (SEQ ID NO: 845).
[2188] 2. The antibody of paragraph 1, wherein the antibody comprises
[2189] (a) a heavy chain variable (VH) domain comprising an amino sequence having at least 90%, at least 95%, or at least 99% sequence identity to the amino acid sequence of SEQ ID NO: 846;
[2190] (b) a light chain variable (VL) domain comprising an amino acid sequence having at least 90%, at least 95%, or at least 99% identity to the amino acid sequence of SEQ ID NO: 847; or (c) a VH domain as in (a) and a VL domain as in (b).
[2191] 3. The antibody of paragraph 1 or 2, further comprising the following VH domain framework regions (FRs):
[2192] (a) an FR-H1 comprising the amino acid sequence of (SEQ ID NO: 848);
[2193] (b) an FR-H2 comprising the amino acid sequence of (SEQ ID NO: 849);
[2194] (c) an FR-H3 comprising the amino acid sequence of (SEQ ID NO: 850); and
[2195] (d) an FR-H4 comprising the amino acid sequence of (SEQ ID NO: 851).
[2196] 4. The antibody of any one of paragraphs 1-3, wherein the VH domain comprises the amino acid sequence of SEQ ID NO: 846.
[2197] 5. The antibody of any one of paragraphs 1-4, further comprising the following VL domain FRs:
[2198] (a) an FR-L1 comprising the amino acid sequence of (SEQ ID NO: 852);
[2199] (b) an FR-L2 comprising the amino acid sequence of (SEQ ID NO: 853);
[2200] (c) an FR-L3 comprising the amino acid sequence of (SEQ ID NO: 854); and
[2201] (d) an FR-L4 comprising the amino acid sequence of (SEQ ID NO: 855).
[2202] 6. The antibody of any one of paragraphs 1-5, wherein the VL domain comprises the amino acid sequence of SEQ ID NO: 847.
[2203] 7. An isolated antibody that binds to Ara h 2, or an antigen-binding fragment thereof, wherein the antibody comprises
[2204] (a) a VH domain comprising an amino acid sequence having at least 90%, at least 95%, or at least 99% sequence identity to the amino acid sequence of SEQ ID NO: 846 and
[2205] (b) a VL domain comprising an amino acid sequence having at least 90%, at least 95%, or at least 99% sequence identity to the amino acid sequence of SEQ ID NO: 847.
[2206] 8. The antibody of paragraph 7, wherein the antibody comprises a VH domain comprising the amino acid sequence of SEQ ID NO: 846 and a VL domain comprising the amino acid sequence of SEQ ID NO: 847.
[2207] 9. The antibody of any one of paragraphs 1-8, wherein the antibody comprises (a) a heavy chain comprising the amino acid sequence of SEQ ID NO: 856 and (b) a light chain comprising the amino acid sequence of SEQ ID NO: 857.
[2208] 10. The antibody of any one of paragraphs 1-9, wherein the antibody binds Ara h 2 with a K_{D} of about 50 nM or less.
[2209] 11. The method of paragraph 10, wherein the K_{D} is measured by a surface plasmon resonance assay.
[2210] 12. The antibody of paragraph 11, wherein the antibody binds Ara h 2 with a K_{D} of between about 0.1 pM and about 40 nM.
[2211] 13. The antibody of paragraph 12, wherein the antibody binds Ara h 2 with a K_{D} of between about 120 pM and about 20 nM.
[2212] 14. The antibody of paragraph 13, wherein the antibody binds Ara h 2 with a K_{D} of between about 120 pM and about 10 nM.
[2213] 15. The antibody of any one of paragraphs 1-14, wherein the antibody is capable neutralizing Ara h 2
[2214] 16. An antibody that binds to the same epitope as the antibody of any one of paragraph 1-15.
[2215] 17. An antibody that competes for binding to Ara h 2 with, or cross-blocks or is cross-blocked by, the antibody of any one of paragraphs 1-16.
[2216] 18. The antibody of paragraph 16 or 17, wherein whether the antibody binds to the same epitope or competes for binding to Ara h 2 is determined by an epitope binning assay.
[2217] 19. The antibody of any one of paragraphs 1-18, wherein the antibody is monoclonal.
[2218] 20. The antibody of any one of paragraphs 1-19, wherein the antibody is humanized.
[2219] 21. The antibody of any one of paragraphs 1-20, wherein the antibody is an antibody fragment that binds Ara h 2.
[2220] 22. The antibody of paragraph 21, wherein the antibody fragment is selected from the group consisting of Fab, Fab′-SH, Fv, scFv, and (Fab′)2 fragments.
[2221] 23. The antibody of any one of paragraphs 1-22, wherein the antibody is a full-length antibody.
[2222] 24. The antibody of paragraph 23, wherein the antibody is an IgG antibody.
[2223] 25. The antibody of paragraph 24, wherein the IgG antibody is an IgG1 antibody.
[2224] 26. The antibody of paragraph 25, wherein the IgG antibody is an IgG4 antibody.
[2225] 27. The antibody of paragraph 26, wherein the IgG4 antibody comprises an S228P mutation (EU numbering).
[2226] 28. The antibody of any one of paragraphs 1-27, wherein the antibody is a monospecific antibody.
[2227] 29. The antibody of any one of paragraphs 1-28, wherein the antibody is a multispecific antibody.
[2228] 30. The antibody of paragraph 29, wherein the antibody is a bispecific antibody.
[2229] 31. A polynucleotide encoding an isolated antibody of any one of paragraphs 1-30.
[2230] 32. A vector comprising the polynucleotide of paragraph 31.
[2231] 33. A host cell comprising the vector of paragraph 32.
[2232] 34. A method of producing the antibody of any one of paragraphs 1-33, the method comprising culturing a host cell that comprises the vector of paragraph 32 and recovering the antibody.
[2233] 35. The method of paragraph 34, wherein the host cell is prokaryotic.
[2234] 36. The method of paragraph 35, wherein the host cell is Escherichia coli.
[2235] 37. The method of paragraph 34, wherein the host cell is eukaryotic.
[2236] 38. The method of paragraph 37, wherein the host cell is a 293 cell, a CHO cell, a yeast cell, or a plant cell.
[2237] 39. A method for treating a patient who demonstrates a sensitivity to, or an allergic reaction against, a nut or a portion thereof or an extract thereof, or to Ara h 2 protein, or for treating at least one symptom or complication associated with a sensitivity to, or allergic reaction against a nut or a portion thereof or an extract thereof, or to Ara h 2, comprising administering an effective amount of one or more isolated antibodies or antigen-binding fragments thereof that bind specifically to Ara h 2, according to any of paragraphs 1-30.
[2238] 40. The method of paragraph 39, further comprising administering an effective amount of a second therapeutic agent useful for diminishing an allergic reaction an allergic reaction against, a nut or a portion thereof or an extract thereof, or to Ara h 2 protein.
[2239] 41. A method for detecting the presence of Ara h 2 neutralizing antibodies in a biological sample, comprising:
[2240] (a) providing a sample from a subject;
[2241] (b) contacting the sample with a mixture comprising:
   [2242] (i) the antibody of any one of paragraphs 1-30 and
   [2243] (ii) Ara h 2, or a fragment thereof; and
[2244] (c) detecting the binding of antibodies present in the biological sample to Ara h 2, or a fragment thereof.
[2245] 42. The method of paragraph 41, where antibody binding is detected using tandem bio-layer interferometry.
[2246] 43. The method of paragraphs 41 or 42, where the antibody from step (b) is bound to a solid support.
[2247] 44. The method of paragraphs 41 or 42, where Ara h 2, or a fragment thereof, is bound to a solid support.
[2248] 45. The method of paragraph 41, where antibody binding is detected using an enzyme-linked immunosorbent assay.

### 13FU1P2B10:

[2249] 1. An isolated antibody that binds to Ara h 2 (conglutin-7), or an antigen-binding fragment thereof, wherein the antibody comprises the following six complementarity determining regions (CDRs):
[2250] (a) an CDR-H1 comprising the amino acid sequence of (SEQ ID NO: 860);
[2251] (b) an CDR-H2 comprising the amino acid sequence of (SEQ ID NO: 861);
[2252] (c) an CDR-H3 comprising the amino acid sequence of (SEQ ID NO: 862);
[2253] (d) an CDR-L1 comprising the amino acid sequence of (SEQ ID NO: 863);
[2254] (e) an CDR-L2 comprising the amino acid sequence of (SEQ ID NO: 864); and
[2255] (f) an CDR-L3 comprising the amino acid sequence of (SEQ ID NO: 865).
[2256] 2. The antibody of paragraph 1, wherein the antibody comprises
[2257] (a) a heavy chain variable (VH) domain comprising an amino sequence having at least 90%, at least 95%, or at least 99% sequence identity to the amino acid sequence of SEQ ID NO: 866;
[2258] (b) a light chain variable (VL) domain comprising an amino acid sequence having at least 90%, at least 95%, or at least 99% identity to the amino acid sequence of SEQ ID NO: 867; or (c) a VH domain as in (a) and a VL domain as in (b).
[2259] 3. The antibody of paragraph 1 or 2, further comprising the following VH domain framework regions (FRs):
[2260] (a) an FR-H1 comprising the amino acid sequence of (SEQ ID NO: 868);
[2261] (b) an FR-H2 comprising the amino acid sequence of (SEQ ID NO: 869);
[2262] (c) an FR-H3 comprising the amino acid sequence of (SEQ ID NO: 870); and
[2263] (d) an FR-H4 comprising the amino acid sequence of (SEQ ID NO: 871).
[2264] 4. The antibody of any one of paragraphs 1-3, wherein the VH domain comprises the amino acid sequence of SEQ ID NO: 866.
[2265] 5. The antibody of any one of paragraphs 1-4, further comprising the following VL domain FRs:
[2266] (a) an FR-L1 comprising the amino acid sequence of (SEQ ID NO: 872);
[2267] (b) an FR-L2 comprising the amino acid sequence of (SEQ ID NO: 873);
[2268] (c) an FR-L3 comprising the amino acid sequence of (SEQ ID NO: 874); and
[2269] (d) an FR-L4 comprising the amino acid sequence of (SEQ ID NO: 875).
[2270] 6. The antibody of any one of paragraphs 1-5, wherein the VL domain comprises the amino acid sequence of SEQ ID NO: 867.
[2271] 7. An isolated antibody that binds to Ara h 2, or an antigen-binding fragment thereof, wherein the antibody comprises
[2272] (a) a VH domain comprising an amino acid sequence having at least 90%, at least 95%, or at least 99% sequence identity to the amino acid sequence of SEQ ID NO: 866 and
[2273] (b) a VL domain comprising an amino acid sequence having at least 90%, at least 95%, or at least 99% sequence identity to the amino acid sequence of SEQ ID NO: 867.
[2274] 8. The antibody of paragraph 7, wherein the antibody comprises a VH domain comprising the amino acid sequence of SEQ ID NO: 866 and a VL domain comprising the amino acid sequence of SEQ ID NO: 867.
[2275] 9. The antibody of any one of paragraphs 1-8, wherein the antibody comprises (a) a heavy chain comprising the amino acid sequence of SEQ ID NO: 876 and (b) a light chain comprising the amino acid sequence of SEQ ID NO: 877.
[2276] 10. The antibody of any one of paragraphs 1-9, wherein the antibody binds Ara h 2 with a K_{D} of about 50 nM or less.
[2277] 11. The method of paragraph 10, wherein the K_{D} is measured by a surface plasmon resonance assay.
[2278] 12. The antibody of paragraph 11, wherein the antibody binds Ara h 2 with a K_{D} of between about 0.1 pM and about 40 nM.
[2279] 13. The antibody of paragraph 12, wherein the antibody binds Ara h 2 with a K_{D} of between about 120 pM and about 20 nM.
[2280] 14. The antibody of paragraph 13, wherein the antibody binds Ara h 2 with a K_{D} of between about 120 pM and about 10 nM.
[2281] 15. The antibody of any one of paragraphs 1-14, wherein the antibody is capable neutralizing Ara h 2
[2282] 16. An antibody that binds to the same epitope as the antibody of any one of paragraph 1-15.
[2283] 17. An antibody that competes for binding to Ara h 2 with, or cross-blocks or is cross-blocked by, the antibody of any one of paragraphs 1-16.
[2284] 18. The antibody of paragraph 16 or 17, wherein whether the antibody binds to the same epitope or competes for binding to Ara h 2 is determined by an epitope binning assay.
[2285] 19. The antibody of any one of paragraphs 1-18, wherein the antibody is monoclonal.
[2286] 20. The antibody of any one of paragraphs 1-19, wherein the antibody is humanized.
[2287] 21. The antibody of any one of paragraphs 1-20, wherein the antibody is an antibody fragment that binds Ara h 2.
[2288] 22. The antibody of paragraph 21, wherein the antibody fragment is selected from the group consisting of Fab, Fab′-SH, Fv, scFv, and (Fab′)₂ fragments.
[2289] 23. The antibody of any one of paragraphs 1-22, wherein the antibody is a full-length antibody.
[2290] 24. The antibody of paragraph 23, wherein the antibody is an IgG antibody.
[2291] 25. The antibody of paragraph 24, wherein the IgG antibody is an IgG1 antibody.
[2292] 26. The antibody of paragraph 25, wherein the IgG antibody is an IgG4 antibody.
[2293] 27. The antibody of paragraph 26, wherein the IgG4 antibody comprises an S228P mutation (EU numbering).
[2294] 28. The antibody of any one of paragraphs 1-27, wherein the antibody is a monospecific antibody.
[2295] 29. The antibody of any one of paragraphs 1-28, wherein the antibody is a multispecific antibody.
[2296] 30. The antibody of paragraph 29, wherein the antibody is a bispecific antibody.
[2297] 31. A polynucleotide encoding an isolated antibody of any one of paragraphs 1-30.
[2298] 32. A vector comprising the polynucleotide of paragraph 31.
[2299] 33. A host cell comprising the vector of paragraph 32.
[2300] 34. A method of producing the antibody of any one of paragraphs 1-33, the method comprising culturing a host cell that comprises the vector of paragraph 32 and recovering the antibody.
[2301] 35. The method of paragraph 34, wherein the host cell is prokaryotic.
[2302] 36. The method of paragraph 35, wherein the host cell is Escherichia coli.
[2303] 37. The method of paragraph 34, wherein the host cell is eukaryotic.
[2304] 38. The method of paragraph 37, wherein the host cell is a 293 cell, a CHO cell, a yeast cell, or a plant cell.
[2305] 39. A method for treating a patient who demonstrates a sensitivity to, or an allergic reaction against, a nut or a portion thereof or an extract thereof, or to Ara h 2 protein, or for treating at least one symptom or complication associated with a sensitivity to, or allergic reaction against a nut or a portion thereof or an extract thereof, or to Ara h 2, comprising administering an effective amount of one or more isolated antibodies or antigen-binding fragments thereof that bind specifically to Ara h 2, according to any of paragraphs 1-30.
[2306] 40. The method of paragraph 39, further comprising administering an effective amount of a second therapeutic agent useful for diminishing an allergic reaction an allergic reaction against, a nut or a portion thereof or an extract thereof, or to Ara h 2 protein.
[2307] 41. A method for detecting the presence of Ara h 2 neutralizing antibodies in a biological sample, comprising:
[2308] (a) providing a sample from a subject;
[2309] (b) contacting the sample with a mixture comprising:
   [2310] (i) the antibody of any one of paragraphs 1-30 and
   [2311] (ii) Ara h 2, or a fragment thereof; and
[2312] (c) detecting the binding of antibodies present in the biological sample to Ara h 2, or a fragment thereof.
[2313] 42. The method of paragraph 41, where antibody binding is detected using tandem bio-layer interferometry.
[2314] 43. The method of paragraphs 41 or 42, where the antibody from step (b) is bound to a solid support.
[2315] 44. The method of paragraphs 41 or 42, where Ara h 2, or a fragment thereof, is bound to a solid support.
[2316] 45. The method of paragraph 41, where antibody binding is detected using an enzyme-linked immunosorbent assay.

### 13FU1P2B12:

[2317] 1. An isolated antibody that binds to Ara h 2 (conglutin-7), or an antigen-binding fragment thereof, wherein the antibody comprises the following six complementarity determining regions (CDRs):
[2318] (a) an CDR-H1 comprising the amino acid sequence of (SEQ ID NO: 880);
[2319] (b) an CDR-H2 comprising the amino acid sequence of (SEQ ID NO: 881);
[2320] (c) an CDR-H3 comprising the amino acid sequence of (SEQ ID NO: 882);
[2321] (d) an CDR-L1 comprising the amino acid sequence of (SEQ ID NO: 883);
[2322] (e) an CDR-L2 comprising the amino acid sequence of (SEQ ID NO: 884); and
[2323] (f) an CDR-L3 comprising the amino acid sequence of (SEQ ID NO: 885).
[2324] 2. The antibody of paragraph 1, wherein the antibody comprises
[2325] (a) a heavy chain variable (VH) domain comprising an amino sequence having at least 90%, at least 95%, or at least 99% sequence identity to the amino acid sequence of SEQ ID NO: 886;
[2326] (b) a light chain variable (VL) domain comprising an amino acid sequence having at least 90%, at least 95%, or at least 99% identity to the amino acid sequence of SEQ ID NO: 887; or (c) a VH domain as in (a) and a VL domain as in (b).
[2327] 3. The antibody of paragraph 1 or 2, further comprising the following VH domain framework regions (FRs):
[2328] (a) an FR-H1 comprising the amino acid sequence of (SEQ ID NO: 888);
[2329] (b) an FR-H2 comprising the amino acid sequence of (SEQ ID NO: 889);
[2330] (c) an FR-H3 comprising the amino acid sequence of (SEQ ID NO: 890); and
[2331] (d) an FR-H4 comprising the amino acid sequence of (SEQ ID NO: 891).
[2332] 4. The antibody of any one of paragraphs 1-3, wherein the VH domain comprises the amino acid sequence of SEQ ID NO: 886.
[2333] 5. The antibody of any one of paragraphs 1-4, further comprising the following VL domain FRs:
[2334] (a) an FR-L1 comprising the amino acid sequence of (SEQ ID NO: 892);
[2335] (b) an FR-L2 comprising the amino acid sequence of (SEQ ID NO: 893);
[2336] (c) an FR-L3 comprising the amino acid sequence of (SEQ ID NO: 894); and
[2337] (d) an FR-L4 comprising the amino acid sequence of (SEQ ID NO: 895).
[2338] 6. The antibody of any one of paragraphs 1-5, wherein the VL domain comprises the amino acid sequence of SEQ ID NO: 887.
[2339] 7. An isolated antibody that binds to Ara h 2, or an antigen-binding fragment thereof, wherein the antibody comprises
[2340] (a) a VH domain comprising an amino acid sequence having at least 90%, at least 95%, or at least 99% sequence identity to the amino acid sequence of SEQ ID NO: 886 and
[2341] (b) a VL domain comprising an amino acid sequence having at least 90%, at least 95%, or at least 99% sequence identity to the amino acid sequence of SEQ ID NO: 887.
[2342] 8. The antibody of paragraph 7, wherein the antibody comprises a VH domain comprising the amino acid sequence of SEQ ID NO: 886 and a VL domain comprising the amino acid sequence of SEQ ID NO: 887.
[2343] 9. The antibody of any one of paragraphs 1-8, wherein the antibody comprises (a) a heavy chain comprising the amino acid sequence of SEQ ID NO: 896 and (b) a light chain comprising the amino acid sequence of SEQ ID NO: 897.
[2344] 10. The antibody of any one of paragraphs 1-9, wherein the antibody binds Ara h 2 with a K_{D} of about 50 nM or less.
[2345] 11. The method of paragraph 10, wherein the K_{D} is measured by a surface plasmon resonance assay.
[2346] 12. The antibody of paragraph 11, wherein the antibody binds Ara h 2 with a K_{D} of between about 0.1 pM and about 40 nM.
[2347] 13. The antibody of paragraph 12, wherein the antibody binds Ara h 2 with a K_{D} of between about 120 pM and about 20 nM.
[2348] 14. The antibody of paragraph 13, wherein the antibody binds Ara h 2 with a K_{D} of between about 120 pM and about 10 nM.
[2349] 15. The antibody of any one of paragraphs 1-14, wherein the antibody is capable neutralizing Ara h 2
[2350] 16. An antibody that binds to the same epitope as the antibody of any one of paragraph 1-15.
[2351] 17. An antibody that competes for binding to Ara h 2 with, or cross-blocks or is cross-blocked by, the antibody of any one of paragraphs 1-16.
[2352] 18. The antibody of paragraph 16 or 17, wherein whether the antibody binds to the same epitope or competes for binding to Ara h 2 is determined by an epitope binning assay.
[2353] 19. The antibody of any one of paragraphs 1-18, wherein the antibody is monoclonal.
[2354] 20. The antibody of any one of paragraphs 1-19, wherein the antibody is humanized.
[2355] 21. The antibody of any one of paragraphs 1-20, wherein the antibody is an antibody fragment that binds Ara h 2.
[2356] 22. The antibody of paragraph 21, wherein the antibody fragment is selected from the group consisting of Fab, Fab′-SH, Fv, scFv, and (Fab′)2 fragments.
[2357] 23. The antibody of any one of paragraphs 1-22, wherein the antibody is a full-length antibody.
[2358] 24. The antibody of paragraph 23, wherein the antibody is an IgG antibody.
[2359] 25. The antibody of paragraph 24, wherein the IgG antibody is an IgG1 antibody.
[2360] 26. The antibody of paragraph 25, wherein the IgG antibody is an IgG4 antibody.
[2361] 27. The antibody of paragraph 26, wherein the IgG4 antibody comprises an S228P mutation (EU numbering).
[2362] 28. The antibody of any one of paragraphs 1-27, wherein the antibody is a monospecific antibody.
[2363] 29. The antibody of any one of paragraphs 1-28, wherein the antibody is a multispecific antibody.
[2364] 30. The antibody of paragraph 29, wherein the antibody is a bispecific antibody.
[2365] 31. A polynucleotide encoding an isolated antibody of any one of paragraphs 1-30.
[2366] 32. A vector comprising the polynucleotide of paragraph 31.
[2367] 33. A host cell comprising the vector of paragraph 32.
[2368] 34. A method of producing the antibody of any one of paragraphs 1-33, the method comprising culturing a host cell that comprises the vector of paragraph 32 and recovering the antibody.
[2369] 35. The method of paragraph 34, wherein the host cell is prokaryotic.
[2370] 36. The method of paragraph 35, wherein the host cell is Escherichia coli.
[2371] 37. The method of paragraph 34, wherein the host cell is eukaryotic.
[2372] 38. The method of paragraph 37, wherein the host cell is a 293 cell, a CHO cell, a yeast cell, or a plant cell.
[2373] 39. A method for treating a patient who demonstrates a sensitivity to, or an allergic reaction against, a nut or a portion thereof or an extract thereof, or to Ara h 2 protein, or for treating at least one symptom or complication associated with a sensitivity to, or allergic reaction against a nut or a portion thereof or an extract thereof, or to Ara h 2, comprising administering an effective amount of one or more isolated antibodies or antigen-binding fragments thereof that bind specifically to Ara h 2, according to any of paragraphs 1-30.
[2374] 40. The method of paragraph 39, further comprising administering an effective amount of a second therapeutic agent useful for diminishing an allergic reaction an allergic reaction against, a nut or a portion thereof or an extract thereof, or to Ara h 2 protein.
[2375] 41. A method for detecting the presence of Ara h 2 neutralizing antibodies in a biological sample, comprising:
[2376] (a) providing a sample from a subject;
[2377] (b) contacting the sample with a mixture comprising:
   [2378] (i) the antibody of any one of paragraphs 1-30 and
   [2379] (ii) Ara h 2, or a fragment thereof; and
[2380] (c) detecting the binding of antibodies present in the biological sample to Ara h 2, or a fragment thereof.
[2381] 42. The method of paragraph 41, where antibody binding is detected using tandem bio-layer interferometry.
[2382] 43. The method of paragraphs 41 or 42, where the antibody from step (b) is bound to a solid support.
[2383] 44. The method of paragraphs 41 or 42, where Ara h 2, or a fragment thereof, is bound to a solid support.
[2384] 45. The method of paragraph 41, where antibody binding is detected using an enzyme-linked immunosorbent assay.

### 6BU4P2B1:

[2385] 1. An isolated antibody that binds to Ara h 2 (conglutin-7), or an antigen-binding fragment thereof, wherein the antibody comprises the following six complementarity determining regions (CDRs):
[2386] (a) an CDR-H1 comprising the amino acid sequence of (SEQ ID NO: 940);
[2387] (b) an CDR-H2 comprising the amino acid sequence of (SEQ ID NO: 941);
[2388] (c) an CDR-H3 comprising the amino acid sequence of (SEQ ID NO: 942);
[2389] (d) an CDR-L1 comprising the amino acid sequence of (SEQ ID NO: 943);
[2390] (e) an CDR-L2 comprising the amino acid sequence of (SEQ ID NO: 944); and
[2391] (f) an CDR-L3 comprising the amino acid sequence of (SEQ ID NO: 945).
[2392] 2. The antibody of paragraph 1, wherein the antibody comprises
[2393] (a) a heavy chain variable (VH) domain comprising an amino sequence having at least 90%, at least 95%, or at least 99% sequence identity to the amino acid sequence of SEQ ID NO: 946;
[2394] (b) a light chain variable (VL) domain comprising an amino acid sequence having at least 90%, at least 95%, or at least 99% identity to the amino acid sequence of SEQ ID NO: 947; or (c) a VH domain as in (a) and a VL domain as in (b).
[2395] 3. The antibody of paragraph 1 or 2, further comprising the following VH domain framework regions (FRs):
[2396] (a) an FR-H1 comprising the amino acid sequence of (SEQ ID NO: 948);
[2397] (b) an FR-H2 comprising the amino acid sequence of (SEQ ID NO: 949);
[2398] (c) an FR-H3 comprising the amino acid sequence of (SEQ ID NO: 950); and
[2399] (d) an FR-H4 comprising the amino acid sequence of (SEQ ID NO: 951).
[2400] 4. The antibody of any one of paragraphs 1-3, wherein the VH domain comprises the amino acid sequence of SEQ ID NO: 946.
[2401] 5. The antibody of any one of paragraphs 1-4, further comprising the following VL domain FRs:
[2402] (a) an FR-L1 comprising the amino acid sequence of (SEQ ID NO: 952);
[2403] (b) an FR-L2 comprising the amino acid sequence of (SEQ ID NO: 953);
[2404] (c) an FR-L3 comprising the amino acid sequence of (SEQ ID NO: 954); and
[2405] (d) an FR-L4 comprising the amino acid sequence of (SEQ ID NO: 955).
[2406] 6. The antibody of any one of paragraphs 1-5, wherein the VL domain comprises the amino acid sequence of SEQ ID NO: 947.
[2407] 7. An isolated antibody that binds to Ara h 2, or an antigen-binding fragment thereof, wherein the antibody comprises
[2408] (a) a VH domain comprising an amino acid sequence having at least 90%, at least 95%, or at least 99% sequence identity to the amino acid sequence of SEQ ID NO: 946 and
[2409] (b) a VL domain comprising an amino acid sequence having at least 90%, at least 95%, or at least 99% sequence identity to the amino acid sequence of SEQ ID NO: 947.
[2410] 8. The antibody of paragraph 7, wherein the antibody comprises a VH domain comprising the amino acid sequence of SEQ ID NO: 946 and a VL domain comprising the amino acid sequence of SEQ ID NO: 947.
[2411] 9. The antibody of any one of paragraphs 1-8, wherein the antibody comprises (a) a heavy chain comprising the amino acid sequence of SEQ ID NO: 956 and (b) a light chain comprising the amino acid sequence of SEQ ID NO: 957.
[2412] 10. The antibody of any one of paragraphs 1-9, wherein the antibody binds Ara h 2 with a K_{D} of about 50 nM or less.
[2413] 11. The method of paragraph 10, wherein the K_{D} is measured by a surface plasmon resonance assay.
[2414] 12. The antibody of paragraph 11, wherein the antibody binds Ara h 2 with a K_{D} of between about 0.1 pM and about 40 nM.
[2415] 13. The antibody of paragraph 12, wherein the antibody binds Ara h 2 with a K_{D} of between about 120 pM and about 20 nM.
[2416] 14. The antibody of paragraph 13, wherein the antibody binds Ara h 2 with a K_{D} of between about 120 pM and about 10 nM.
[2417] 15. The antibody of any one of paragraphs 1-14, wherein the antibody is capable neutralizing Ara h 2
[2418] 16. An antibody that binds to the same epitope as the antibody of any one of paragraph 1-15.
[2419] 17. An antibody that competes for binding to Ara h 2 with, or cross-blocks or is cross-blocked by, the antibody of any one of paragraphs 1-16.
[2420] 18. The antibody of paragraph 16 or 17, wherein whether the antibody binds to the same epitope or competes for binding to Ara h 2 is determined by an epitope binning assay.
[2421] 19. The antibody of any one of paragraphs 1-18, wherein the antibody is monoclonal.
[2422] 20. The antibody of any one of paragraphs 1-19, wherein the antibody is humanized.
[2423] 21. The antibody of any one of paragraphs 1-20, wherein the antibody is an antibody fragment that binds Ara h 2.
[2424] 22. The antibody of paragraph 21, wherein the antibody fragment is selected from the group consisting of Fab, Fab′-SH, Fv, scFv, and (Fab′)2 fragments.
[2425] 23. The antibody of any one of paragraphs 1-22, wherein the antibody is a full-length antibody.
[2426] 24. The antibody of paragraph 23, wherein the antibody is an IgG antibody.
[2427] 25. The antibody of paragraph 24, wherein the IgG antibody is an IgG1 antibody.
[2428] 26. The antibody of paragraph 25, wherein the IgG antibody is an IgG4 antibody.
[2429] 27. The antibody of paragraph 26, wherein the IgG4 antibody comprises an S228P mutation (EU numbering).
[2430] 28. The antibody of any one of paragraphs 1-27, wherein the antibody is a monospecific antibody.
[2431] 29. The antibody of any one of paragraphs 1-28, wherein the antibody is a multispecific antibody.
[2432] 30. The antibody of paragraph 29, wherein the antibody is a bispecific antibody.
[2433] 31. A polynucleotide encoding an isolated antibody of any one of paragraphs 1-30.
[2434] 32. A vector comprising the polynucleotide of paragraph 31.
[2435] 33. A host cell comprising the vector of paragraph 32.
[2436] 34. A method of producing the antibody of any one of paragraphs 1-33, the method comprising culturing a host cell that comprises the vector of paragraph 32 and recovering the antibody.
[2437] 35. The method of paragraph 34, wherein the host cell is prokaryotic.
[2438] 36. The method of paragraph 35, wherein the host cell is Escherichia coli.
[2439] 37. The method of paragraph 34, wherein the host cell is eukaryotic.
[2440] 38. The method of paragraph 37, wherein the host cell is a 293 cell, a CHO cell, a yeast cell, or a plant cell.
[2441] 39. A method for treating a patient who demonstrates a sensitivity to, or an allergic reaction against, a nut or a portion thereof or an extract thereof, or to Ara h 2 protein, or for treating at least one symptom or complication associated with a sensitivity to, or allergic reaction against a nut or a portion thereof or an extract thereof, or to Ara h 2, comprising administering an effective amount of one or more isolated antibodies or antigen-binding fragments thereof that bind specifically to Ara h 2, according to any of paragraphs 1-30.
[2442] 40. The method of paragraph 39, further comprising administering an effective amount of a second therapeutic agent useful for diminishing an allergic reaction an allergic reaction against, a nut or a portion thereof or an extract thereof, or to Ara h 2 protein.
[2443] 41. A method for detecting the presence of Ara h 2 neutralizing antibodies in a biological sample, comprising:
[2444] (a) providing a sample from a subject;
[2445] (b) contacting the sample with a mixture comprising:
   [2446] (i) the antibody of any one of paragraphs 1-30 and
   [2447] (ii) Ara h 2, or a fragment thereof; and
[2448] (c) detecting the binding of antibodies present in the biological sample to Ara h 2, or a fragment thereof.
[2449] 42. The method of paragraph 41, where antibody binding is detected using tandem bio-layer interferometry.
[2450] 43. The method of paragraphs 41 or 42, where the antibody from step (b) is bound to a solid support.
[2451] 44. The method of paragraphs 41 or 42, where Ara h 2, or a fragment thereof, is bound to a solid support.
[2452] 45. The method of paragraph 41, where antibody binding is detected using an enzyme-linked immunosorbent assay.

### 105BU7P1D6:

[2453] 1. An isolated antibody that binds to Ara h 2 (conglutin-7), or an antigen-binding fragment thereof, wherein the antibody comprises the following six complementarity determining regions (CDRs):
[2454] (a) an CDR-H1 comprising the amino acid sequence of (SEQ ID NO: 1440);
[2455] (b) an CDR-H2 comprising the amino acid sequence of (SEQ ID NO: 1441);
[2456] (c) an CDR-H3 comprising the amino acid sequence of (SEQ ID NO: 1442);
[2457] (d) an CDR-L1 comprising the amino acid sequence of (SEQ ID NO: 1443);
[2458] (e) an CDR-L2 comprising the amino acid sequence of (SEQ ID NO: 1444); and
[2459] (f) an CDR-L3 comprising the amino acid sequence of (SEQ ID NO: 1445).
[2460] 2. The antibody of paragraph 1, wherein the antibody comprises
[2461] (a) a heavy chain variable (VH) domain comprising an amino sequence having at least 90%, at least 95%, or at least 99% sequence identity to the amino acid sequence of SEQ ID NO: 1446;
[2462] (b) a light chain variable (VL) domain comprising an amino acid sequence having at least 90%, at least 95%, or at least 99% identity to the amino acid sequence of SEQ ID NO: 1447; or (c) a VH domain as in (a) and a VL domain as in (b).
[2463] 3. The antibody of paragraph 1 or 2, further comprising the following VH domain framework regions (FRs):
[2464] (a) an FR-H1 comprising the amino acid sequence of (SEQ ID NO: 1448);
[2465] (b) an FR-H2 comprising the amino acid sequence of (SEQ ID NO: 1449);
[2466] (c) an FR-H3 comprising the amino acid sequence of (SEQ ID NO: 1450); and
[2467] (d) an FR-H4 comprising the amino acid sequence of (SEQ ID NO: 1451).
[2468] 4. The antibody of any one of paragraphs 1-3, wherein the VH domain comprises the amino acid sequence of SEQ ID NO: 1446.
[2469] 5. The antibody of any one of paragraphs 1-4, further comprising the following VL domain FRs:
[2470] (a) an FR-L1 comprising the amino acid sequence of (SEQ ID NO: 1452);
[2471] (b) an FR-L2 comprising the amino acid sequence of (SEQ ID NO: 1453);
[2472] (c) an FR-L3 comprising the amino acid sequence of (SEQ ID NO: 1454); and
[2473] (d) an FR-L4 comprising the amino acid sequence of (SEQ ID NO: 1455).
[2474] 6. The antibody of any one of paragraphs 1-5, wherein the VL domain comprises the amino acid sequence of SEQ ID NO: 1447.
[2475] 7. An isolated antibody that binds to Ara h 2, or an antigen-binding fragment thereof, wherein the antibody comprises
[2476] (a) a VH domain comprising an amino acid sequence having at least 90%, at least 95%, or at least 99% sequence identity to the amino acid sequence of SEQ ID NO: 1446 and
[2477] (b) a VL domain comprising an amino acid sequence having at least 90%, at least 95%, or at least 99% sequence identity to the amino acid sequence of SEQ ID NO: 1447.
[2478] 8. The antibody of paragraph 7, wherein the antibody comprises a VH domain comprising the amino acid sequence of SEQ ID NO: 1446 and a VL domain comprising the amino acid sequence of SEQ ID NO: 1447.
[2479] 9. The antibody of any one of paragraphs 1-8, wherein the antibody comprises (a) a heavy chain comprising the amino acid sequence of SEQ ID NO: 1456 and (b) a light chain comprising the amino acid sequence of SEQ ID NO: 1457.
[2480] 10. The antibody of any one of paragraphs 1-9, wherein the antibody binds Ara h 2 with a K_{D} of about 50 nM or less.
[2481] 11. The method of paragraph 10, wherein the K_{D} is measured by a surface plasmon resonance assay.
[2482] 12. The antibody of paragraph 11, wherein the antibody binds Ara h 2 with a K_{D} of between about 0.1 pM and about 40 nM.
[2483] 13. The antibody of paragraph 12, wherein the antibody binds Ara h 2 with a K_{D} of between about 120 pM and about 20 nM.
[2484] 14. The antibody of paragraph 13, wherein the antibody binds Ara h 2 with a K_{D} of between about 120 pM and about 10 nM.
[2485] 15. The antibody of any one of paragraphs 1-14, wherein the antibody is capable neutralizing Ara h 2
[2486] 16. An antibody that binds to the same epitope as the antibody of any one of paragraph 1-15.
[2487] 17. An antibody that competes for binding to Ara h 2 with, or cross-blocks or is cross-blocked by, the antibody of any one of paragraphs 1-16.
[2488] 18. The antibody of paragraph 16 or 17, wherein whether the antibody binds to the same epitope or competes for binding to Ara h 2 is determined by an epitope binning assay.
[2489] 19. The antibody of any one of paragraphs 1-18, wherein the antibody is monoclonal.
[2490] 20. The antibody of any one of paragraphs 1-19, wherein the antibody is humanized.
[2491] 21. The antibody of any one of paragraphs 1-20, wherein the antibody is an antibody fragment that binds Ara h 2.
[2492] 22. The antibody of paragraph 21, wherein the antibody fragment is selected from the group consisting of Fab, Fab′-SH, Fv, scFv, and (Fab′)2 fragments.
[2493] 23. The antibody of any one of paragraphs 1-22, wherein the antibody is a full-length antibody.
[2494] 24. The antibody of paragraph 23, wherein the antibody is an IgG antibody.
[2495] 25. The antibody of paragraph 24, wherein the IgG antibody is an IgG1 antibody.
[2496] 26. The antibody of paragraph 25, wherein the IgG antibody is an IgG4 antibody.
[2497] 27. The antibody of paragraph 26, wherein the IgG4 antibody comprises an S228P mutation (EU numbering).
[2498] 28. The antibody of any one of paragraphs 1-27, wherein the antibody is a monospecific antibody.
[2499] 29. The antibody of any one of paragraphs 1-28, wherein the antibody is a multispecific antibody.
[2500] 30. The antibody of paragraph 29, wherein the antibody is a bispecific antibody.
[2501] 31. A polynucleotide encoding an isolated antibody of any one of paragraphs 1-30.
[2502] 32. A vector comprising the polynucleotide of paragraph 31.
[2503] 33. A host cell comprising the vector of paragraph 32.
[2504] 34. A method of producing the antibody of any one of paragraphs 1-33, the method comprising culturing a host cell that comprises the vector of paragraph 32 and recovering the antibody.
[2505] 35. The method of paragraph 34, wherein the host cell is prokaryotic.
[2506] 36. The method of paragraph 35, wherein the host cell is Escherichia coli.
[2507] 37. The method of paragraph 34, wherein the host cell is eukaryotic.
[2508] 38. The method of paragraph 37, wherein the host cell is a 293 cell, a CHO cell, a yeast cell, or a plant cell.
[2509] 39. A method for treating a patient who demonstrates a sensitivity to, or an allergic reaction against, a nut or a portion thereof or an extract thereof, or to Ara h 2 protein, or for treating at least one symptom or complication associated with a sensitivity to, or allergic reaction against a nut or a portion thereof or an extract thereof, or to Ara h 2, comprising administering an effective amount of one or more isolated antibodies or antigen-binding fragments thereof that bind specifically to Ara h 2, according to any of paragraphs 1-30.
[2510] 40. The method of paragraph 39, further comprising administering an effective amount of a second therapeutic agent useful for diminishing an allergic reaction an allergic reaction against, a nut or a portion thereof or an extract thereof, or to Ara h 2 protein.
[2511] 41. A method for detecting the presence of Ara h 2 neutralizing antibodies in a biological sample, comprising:
[2512] (a) providing a sample from a subject;
[2513] (b) contacting the sample with a mixture comprising:
   [2514] (i) the antibody of any one of paragraphs 1-30 and
   [2515] (ii) Ara h 2, or a fragment thereof; and
[2516] (c) detecting the binding of antibodies present in the biological sample to Ara h 2, or a fragment thereof.
[2517] 42. The method of paragraph 41, where antibody binding is detected using tandem bio-layer interferometry.
[2518] 43. The method of paragraphs 41 or 42, where the antibody from step (b) is bound to a solid support.
[2519] 44. The method of paragraphs 41 or 42, where Ara h 2, or a fragment thereof, is bound to a solid support.
[2520] 45. The method of paragraph 41, where antibody binding is detected using an enzyme-linked immunosorbent assay.

### 105BU7P1D8:

[2521] 1. An isolated antibody that binds to Ara h 2 (conglutin-7), or an antigen-binding fragment thereof, wherein the antibody comprises the following six complementarity determining regions (CDRs):
[2522] (a) an CDR-H1 comprising the amino acid sequence of (SEQ ID NO: 1480);
[2523] (b) an CDR-H2 comprising the amino acid sequence of (SEQ ID NO: 1481);
[2524] (c) an CDR-H3 comprising the amino acid sequence of (SEQ ID NO: 1482);
[2525] (d) an CDR-L1 comprising the amino acid sequence of (SEQ ID NO: 1483);
[2526] (e) an CDR-L2 comprising the amino acid sequence of (SEQ ID NO: 1484); and
[2527] (f) an CDR-L3 comprising the amino acid sequence of (SEQ ID NO: 1485).
[2528] 2. The antibody of paragraph 1, wherein the antibody comprises
[2529] (a) a heavy chain variable (VH) domain comprising an amino sequence having at least 90%, at least 95%, or at least 99% sequence identity to the amino acid sequence of SEQ ID NO: 1486;
[2530] (b) a light chain variable (VL) domain comprising an amino acid sequence having at least 90%, at least 95%, or at least 99% identity to the amino acid sequence of SEQ ID NO: 1487; or (c) a VH domain as in (a) and a VL domain as in (b).
[2531] 3. The antibody of paragraph 1 or 2, further comprising the following VH domain framework regions (FRs):
[2532] (a) an FR-H1 comprising the amino acid sequence of (SEQ ID NO: 1488);
[2533] (b) an FR-H2 comprising the amino acid sequence of (SEQ ID NO: 1489);
[2534] (c) an FR-H3 comprising the amino acid sequence of (SEQ ID NO: 1490); and
[2535] (d) an FR-H4 comprising the amino acid sequence of (SEQ ID NO: 1491).
[2536] 4. The antibody of any one of paragraphs 1-3, wherein the VH domain comprises the amino acid sequence of SEQ ID NO: 1486.
[2537] 5. The antibody of any one of paragraphs 1-4, further comprising the following VL domain FRs:
[2538] (a) an FR-L1 comprising the amino acid sequence of (SEQ ID NO: 1452);
[2539] (b) an FR-L2 comprising the amino acid sequence of (SEQ ID NO: 1453);
[2540] (c) an FR-L3 comprising the amino acid sequence of (SEQ ID NO: 1454); and
[2541] (d) an FR-L4 comprising the amino acid sequence of (SEQ ID NO: 1455).
[2542] 6. The antibody of any one of paragraphs 1-5, wherein the VL domain comprises the amino acid sequence of SEQ ID NO: 1487.
[2543] 7. An isolated antibody that binds to Ara h 2, or an antigen-binding fragment thereof, wherein the antibody comprises
[2544] (a) a VH domain comprising an amino acid sequence having at least 90%, at least 95%, or at least 99% sequence identity to the amino acid sequence of SEQ ID NO: 1486 and
[2545] (b) a VL domain comprising an amino acid sequence having at least 90%, at least 95%, or at least 99% sequence identity to the amino acid sequence of SEQ ID NO: 1487.
[2546] 8. The antibody of paragraph 7, wherein the antibody comprises a VH domain comprising the amino acid sequence of SEQ ID NO: 1486 and a VL domain comprising the amino acid sequence of SEQ ID NO: 1487.
[2547] 9. The antibody of any one of paragraphs 1-8, wherein the antibody comprises (a) a heavy chain comprising the amino acid sequence of SEQ ID NO: 1496 and (b) a light chain comprising the amino acid sequence of SEQ ID NO: 1497.
[2548] 10. The antibody of any one of paragraphs 1-9, wherein the antibody binds Ara h 2 with a K_{D} of about 50 nM or less.
[2549] 11. The method of paragraph 10, wherein the K_{D} is measured by a surface plasmon resonance assay.
[2550] 12. The antibody of paragraph 11, wherein the antibody binds Ara h 2 with a K_{D} of between about 0.1 pM and about 40 nM.
[2551] 13. The antibody of paragraph 12, wherein the antibody binds Ara h 2 with a K_{D} of between about 120 pM and about 20 nM.
[2552] 14. The antibody of paragraph 13, wherein the antibody binds Ara h 2 with a K_{D} of between about 120 pM and about 10 nM.
[2553] 15. The antibody of any one of paragraphs 1-14, wherein the antibody is capable neutralizing Ara h 2
[2554] 16. An antibody that binds to the same epitope as the antibody of any one of paragraph 1-15.
[2555] 17. An antibody that competes for binding to Ara h 2 with, or cross-blocks or is cross-blocked by, the antibody of any one of paragraphs 1-16.
[2556] 18. The antibody of paragraph 16 or 17, wherein whether the antibody binds to the same epitope or competes for binding to Ara h 2 is determined by an epitope binning assay.
[2557] 19. The antibody of any one of paragraphs 1-18, wherein the antibody is monoclonal.
[2558] 20. The antibody of any one of paragraphs 1-19, wherein the antibody is humanized.
[2559] 21. The antibody of any one of paragraphs 1-20, wherein the antibody is an antibody fragment that binds Ara h 2.
[2560] 22. The antibody of paragraph 21, wherein the antibody fragment is selected from the group consisting of Fab, Fab′-SH, Fv, scFv, and (Fab′)₂ fragments.
[2561] 23. The antibody of any one of paragraphs 1-22, wherein the antibody is a full-length antibody.
[2562] 24. The antibody of paragraph 23, wherein the antibody is an IgG antibody.
[2563] 25. The antibody of paragraph 24, wherein the IgG antibody is an IgG1 antibody.
[2564] 26. The antibody of paragraph 25, wherein the IgG antibody is an IgG4 antibody.
[2565] 27. The antibody of paragraph 26, wherein the IgG4 antibody comprises an S228P mutation (EU numbering).
[2566] 28. The antibody of any one of paragraphs 1-27, wherein the antibody is a monospecific antibody.
[2567] 29. The antibody of any one of paragraphs 1-28, wherein the antibody is a multispecific antibody.
[2568] 30. The antibody of paragraph 29, wherein the antibody is a bispecific antibody.
[2569] 31. A polynucleotide encoding an isolated antibody of any one of paragraphs 1-30.
[2570] 32. A vector comprising the polynucleotide of paragraph 31.
[2571] 33. A host cell comprising the vector of paragraph 32.
[2572] 34. A method of producing the antibody of any one of paragraphs 1-33, the method comprising culturing a host cell that comprises the vector of paragraph 32 and recovering the antibody.
[2573] 35. The method of paragraph 34, wherein the host cell is prokaryotic.
[2574] 36. The method of paragraph 35, wherein the host cell is Escherichia coli.
[2575] 37. The method of paragraph 34, wherein the host cell is eukaryotic.
[2576] 38. The method of paragraph 37, wherein the host cell is a 293 cell, a CHO cell, a yeast cell, or a plant cell.
[2577] 39. A method for treating a patient who demonstrates a sensitivity to, or an allergic reaction against, a nut or a portion thereof or an extract thereof, or to Ara h 2 protein, or for treating at least one symptom or complication associated with a sensitivity to, or allergic reaction against a nut or a portion thereof or an extract thereof, or to Ara h 2, comprising administering an effective amount of one or more isolated antibodies or antigen-binding fragments thereof that bind specifically to Ara h 2, according to any of paragraphs 1-30.
[2578] 40. The method of paragraph 39, further comprising administering an effective amount of a second therapeutic agent useful for diminishing an allergic reaction an allergic reaction against, a nut or a portion thereof or an extract thereof, or to Ara h 2 protein.
[2579] 41. A method for detecting the presence of Ara h 2 neutralizing antibodies in a biological sample, comprising:
[2580] (a) providing a sample from a subject;
[2581] (b) contacting the sample with a mixture comprising:
   [2582] (i) the antibody of any one of paragraphs 1-30 and
   [2583] (ii) Ara h 2, or a fragment thereof; and
[2584] (c) detecting the binding of antibodies present in the biological sample to Ara h 2, or a fragment thereof.
[2585] 42. The method of paragraph 41, where antibody binding is detected using tandem bio-layer interferometry.
[2586] 43. The method of paragraphs 41 or 42, where the antibody from step (b) is bound to a solid support.
[2587] 44. The method of paragraphs 41 or 42, where Ara h 2, or a fragment thereof, is bound to a solid support.
[2588] 45. The method of paragraph 41, where antibody binding is detected using an enzyme-linked immunosorbent assay.

### 111BU7A12:

[2589] 1. An isolated antibody that binds to Ara h 2 (conglutin-7), or an antigen-binding fragment thereof, wherein the antibody comprises the following six complementarity determining regions (CDRs):
[2590] (a) an CDR-H1 comprising the amino acid sequence of (SEQ ID NO: 1520);
[2591] (b) an CDR-H2 comprising the amino acid sequence of (SEQ ID NO: 1521);
[2592] (c) an CDR-H3 comprising the amino acid sequence of (SEQ ID NO: 1522);
[2593] (d) an CDR-L1 comprising the amino acid sequence of (SEQ ID NO: 1523);
[2594] (e) an CDR-L2 comprising the amino acid sequence of (SEQ ID NO: 1524); and
[2595] (f) an CDR-L3 comprising the amino acid sequence of (SEQ ID NO: 1525).
[2596] 2. The antibody of paragraph 1, wherein the antibody comprises
[2597] (a) a heavy chain variable (VH) domain comprising an amino sequence having at least 90%, at least 95%, or at least 99% sequence identity to the amino acid sequence of SEQ ID NO: 1526;
[2598] (b) a light chain variable (VL) domain comprising an amino acid sequence having at least 90%, at least 95%, or at least 99% identity to the amino acid sequence of SEQ ID NO: 1527; or (c) a VH domain as in (a) and a VL domain as in (b).
[2599] 3. The antibody of paragraph 1 or 2, further comprising the following VH domain framework regions (FRs):
[2600] (a) an FR-H1 comprising the amino acid sequence of (SEQ ID NO: 1528);
[2601] (b) an FR-H2 comprising the amino acid sequence of (SEQ ID NO: 1529);
[2602] (c) an FR-H3 comprising the amino acid sequence of (SEQ ID NO: 1530); and
[2603] (d) an FR-H4 comprising the amino acid sequence of (SEQ ID NO: 1531).
[2604] 4. The antibody of any one of paragraphs 1-3, wherein the VH domain comprises the amino acid sequence of SEQ ID NO: 1526.
[2605] 5. The antibody of any one of paragraphs 1-4, further comprising the following VL domain FRs:
[2606] (a) an FR-L1 comprising the amino acid sequence of (SEQ ID NO: 1532);
[2607] (b) an FR-L2 comprising the amino acid sequence of (SEQ ID NO: 1533);
[2608] (c) an FR-L3 comprising the amino acid sequence of (SEQ ID NO: 1534); and
[2609] (d) an FR-L4 comprising the amino acid sequence of (SEQ ID NO: 1535).
[2610] 6. The antibody of any one of paragraphs 1-5, wherein the VL domain comprises the amino acid sequence of SEQ ID NO: 1527.
[2611] 7. An isolated antibody that binds to Ara h 2, or an antigen-binding fragment thereof, wherein the antibody comprises
[2612] (a) a VH domain comprising an amino acid sequence having at least 90%, at least 95%, or at least 99% sequence identity to the amino acid sequence of SEQ ID NO: 1526 and
[2613] (b) a VL domain comprising an amino acid sequence having at least 90%, at least 95%, or at least 99% sequence identity to the amino acid sequence of SEQ ID NO: 1527.
[2614] 8. The antibody of paragraph 7, wherein the antibody comprises a VH domain comprising the amino acid sequence of SEQ ID NO: 1526 and a VL domain comprising the amino acid sequence of SEQ ID NO: 1527.
[2615] 9. The antibody of any one of paragraphs 1-8, wherein the antibody comprises (a) a heavy chain comprising the amino acid sequence of SEQ ID NO: 1536 and (b) a light chain comprising the amino acid sequence of SEQ ID NO: 1537.
[2616] 10. The antibody of any one of paragraphs 1-9, wherein the antibody binds Ara h 2 with a K_{D} of about 50 nM or less.
[2617] 11. The method of paragraph 10, wherein the K_{D} is measured by a surface plasmon resonance assay.
[2618] 12. The antibody of paragraph 11, wherein the antibody binds Ara h 2 with a K_{D} of between about 0.1 pM and about 40 nM.
[2619] 13. The antibody of paragraph 12, wherein the antibody binds Ara h 2 with a K_{D} of between about 120 pM and about 20 nM.
[2620] 14. The antibody of paragraph 13, wherein the antibody binds Ara h 2 with a K_{D} of between about 120 pM and about 10 nM.
[2621] 15. The antibody of any one of paragraphs 1-14, wherein the antibody is capable neutralizing Ara h 2
[2622] 16. An antibody that binds to the same epitope as the antibody of any one of paragraph 1-15.
[2623] 17. An antibody that competes for binding to Ara h 2 with, or cross-blocks or is cross-blocked by, the antibody of any one of paragraphs 1-16.
[2624] 18. The antibody of paragraph 16 or 17, wherein whether the antibody binds to the same epitope or competes for binding to Ara h 2 is determined by an epitope binning assay.
[2625] 19. The antibody of any one of paragraphs 1-18, wherein the antibody is monoclonal.
[2626] 20. The antibody of any one of paragraphs 1-19, wherein the antibody is humanized.
[2627] 21. The antibody of any one of paragraphs 1-20, wherein the antibody is an antibody fragment that binds Ara h 2.
[2628] 22. The antibody of paragraph 21, wherein the antibody fragment is selected from the group consisting of Fab, Fab′-SH, Fv, scFv, and (Fab′)₂ fragments.
[2629] 23. The antibody of any one of paragraphs 1-22, wherein the antibody is a full-length antibody.
[2630] 24. The antibody of paragraph 23, wherein the antibody is an IgG antibody.
[2631] 25. The antibody of paragraph 24, wherein the IgG antibody is an IgG1 antibody.
[2632] 26. The antibody of paragraph 25, wherein the IgG antibody is an IgG4 antibody.
[2633] 27. The antibody of paragraph 26, wherein the IgG4 antibody comprises an S228P mutation (EU numbering).
[2634] 28. The antibody of any one of paragraphs 1-27, wherein the antibody is a monospecific antibody.
[2635] 29. The antibody of any one of paragraphs 1-28, wherein the antibody is a multispecific antibody.
[2636] 30. The antibody of paragraph 29, wherein the antibody is a bispecific antibody.
[2637] 31. A polynucleotide encoding an isolated antibody of any one of paragraphs 1-30.
[2638] 32. A vector comprising the polynucleotide of paragraph 31.
[2639] 33. A host cell comprising the vector of paragraph 32.
[2640] 34. A method of producing the antibody of any one of paragraphs 1-33, the method comprising culturing a host cell that comprises the vector of paragraph 32 and recovering the antibody.
[2641] 35. The method of paragraph 34, wherein the host cell is prokaryotic.
[2642] 36. The method of paragraph 35, wherein the host cell is Escherichia coli.
[2643] 37. The method of paragraph 34, wherein the host cell is eukaryotic.
[2644] 38. The method of paragraph 37, wherein the host cell is a 293 cell, a CHO cell, a yeast cell, or a plant cell.
[2645] 39. A method for treating a patient who demonstrates a sensitivity to, or an allergic reaction against, a nut or a portion thereof or an extract thereof, or to Ara h 2 protein, or for treating at least one symptom or complication associated with a sensitivity to, or allergic reaction against a nut or a portion thereof or an extract thereof, or to Ara h 2, comprising administering an effective amount of one or more isolated antibodies or antigen-binding fragments thereof that bind specifically to Ara h 2, according to any of paragraphs 1-30.
[2646] 40. The method of paragraph 39, further comprising administering an effective amount of a second therapeutic agent useful for diminishing an allergic reaction an allergic reaction against, a nut or a portion thereof or an extract thereof, or to Ara h 2 protein.
[2647] 41. A method for detecting the presence of Ara h 2 neutralizing antibodies in a biological sample, comprising:
[2648] (a) providing a sample from a subject;
[2649] (b) contacting the sample with a mixture comprising:
   [2650] (i) the antibody of any one of paragraphs 1-30 and
   [2651] (ii) Ara h 2, or a fragment thereof; and
[2652] (c) detecting the binding of antibodies present in the biological sample to Ara h 2, or a fragment thereof.
[2653] 42. The method of paragraph 41, where antibody binding is detected using tandem bio-layer interferometry.
[2654] 43. The method of paragraphs 41 or 42, where the antibody from step (b) is bound to a solid support.
[2655] 44. The method of paragraphs 41 or 42, where Ara h 2, or a fragment thereof, is bound to a solid support.
[2656] 45. The method of paragraph 41, where antibody binding is detected using an enzyme-linked immunosorbent assay.

### 111BU7P1D2:

[2657] 1. An isolated antibody that binds to Ara h 2 (conglutin-7), or an antigen-binding fragment thereof, wherein the antibody comprises the following six complementarity determining regions (CDRs):
[2658] (a) an CDR-H1 comprising the amino acid sequence of (SEQ ID NO: 1540);
[2659] (b) an CDR-H2 comprising the amino acid sequence of (SEQ ID NO: 1541);
[2660] (c) an CDR-H3 comprising the amino acid sequence of (SEQ ID NO: 1542);
[2661] (d) an CDR-L1 comprising the amino acid sequence of (SEQ ID NO: 1543);
[2662] (e) an CDR-L2 comprising the amino acid sequence of (SEQ ID NO: 1544); and
[2663] (f) an CDR-L3 comprising the amino acid sequence of (SEQ ID NO: 1545).
[2664] 2. The antibody of paragraph 1, wherein the antibody comprises
[2665] (a) a heavy chain variable (VH) domain comprising an amino sequence having at least 90%, at least 95%, or at least 99% sequence identity to the amino acid sequence of SEQ ID NO: 1546;
[2666] (b) a light chain variable (VL) domain comprising an amino acid sequence having at least 90%, at least 95%, or at least 99% identity to the amino acid sequence of SEQ ID NO: 1547; or (c) a VH domain as in (a) and a VL domain as in (b).
[2667] 3. The antibody of paragraph 1 or 2, further comprising the following VH domain framework regions (FRs):
[2668] (a) an FR-H1 comprising the amino acid sequence of (SEQ ID NO: 1548);
[2669] (b) an FR-H2 comprising the amino acid sequence of (SEQ ID NO: 1549);
[2670] (c) an FR-H3 comprising the amino acid sequence of (SEQ ID NO: 1550); and
[2671] (d) an FR-H4 comprising the amino acid sequence of (SEQ ID NO: 1551).
[2672] 4. The antibody of any one of paragraphs 1-3, wherein the VH domain comprises the amino acid sequence of SEQ ID NO: 1546.
[2673] 5. The antibody of any one of paragraphs 1-4, further comprising the following VL domain FRs:
[2674] (a) an FR-L1 comprising the amino acid sequence of (SEQ ID NO: 1552);
[2675] (b) an FR-L2 comprising the amino acid sequence of (SEQ ID NO: 1553);
[2676] (c) an FR-L3 comprising the amino acid sequence of (SEQ ID NO: 1554); and
[2677] (d) an FR-L4 comprising the amino acid sequence of (SEQ ID NO: 1555).
[2678] 6. The antibody of any one of paragraphs 1-5, wherein the VL domain comprises the amino acid sequence of SEQ ID NO: 1547.
[2679] 7. An isolated antibody that binds to Ara h 2, or an antigen-binding fragment thereof, wherein the antibody comprises
[2680] (a) a VH domain comprising an amino acid sequence having at least 90%, at least 95%, or at least 99% sequence identity to the amino acid sequence of SEQ ID NO: 1546 and
[2681] (b) a VL domain comprising an amino acid sequence having at least 90%, at least 95%, or at least 99% sequence identity to the amino acid sequence of SEQ ID NO: 1547.
[2682] 8. The antibody of paragraph 7, wherein the antibody comprises a VH domain comprising the amino acid sequence of SEQ ID NO: 1546 and a VL domain comprising the amino acid sequence of SEQ ID NO: 1547.
[2683] 9. The antibody of any one of paragraphs 1-8, wherein the antibody comprises (a) a heavy chain comprising the amino acid sequence of SEQ ID NO: 1556 and (b) a light chain comprising the amino acid sequence of SEQ ID NO: 1557.
[2684] 10. The antibody of any one of paragraphs 1-9, wherein the antibody binds Ara h 2 with a K_{D} of about 50 nM or less.
[2685] 11. The method of paragraph 10, wherein the K_{D} is measured by a surface plasmon resonance assay.
[2686] 12. The antibody of paragraph 11, wherein the antibody binds Ara h 2 with a K_{D} of between about 0.1 pM and about 40 nM.
[2687] 13. The antibody of paragraph 12, wherein the antibody binds Ara h 2 with a K_{D} of between about 120 pM and about 20 nM.
[2688] 14. The antibody of paragraph 13, wherein the antibody binds Ara h 2 with a K_{D} of between about 120 pM and about 10 nM.
[2689] 15. The antibody of any one of paragraphs 1-14, wherein the antibody is capable neutralizing Ara h 2
[2690] 16. An antibody that binds to the same epitope as the antibody of any one of paragraph 1-15.
[2691] 17. An antibody that competes for binding to Ara h 2 with, or cross-blocks or is cross-blocked by, the antibody of any one of paragraphs 1-16.
[2692] 18. The antibody of paragraph 16 or 17, wherein whether the antibody binds to the same epitope or competes for binding to Ara h 2 is determined by an epitope binning assay.
[2693] 19. The antibody of any one of paragraphs 1-18, wherein the antibody is monoclonal.
[2694] 20. The antibody of any one of paragraphs 1-19, wherein the antibody is humanized.
[2695] 21. The antibody of any one of paragraphs 1-20, wherein the antibody is an antibody fragment that binds Ara h 2.
[2696] 22. The antibody of paragraph 21, wherein the antibody fragment is selected from the group consisting of Fab, Fab′-SH, Fv, scFv, and (Fab′)2 fragments.
[2697] 23. The antibody of any one of paragraphs 1-22, wherein the antibody is a full-length antibody.
[2698] 24. The antibody of paragraph 23, wherein the antibody is an IgG antibody.
[2699] 25. The antibody of paragraph 24, wherein the IgG antibody is an IgG1 antibody.
[2700] 26. The antibody of paragraph 25, wherein the IgG antibody is an IgG4 antibody.
[2701] 27. The antibody of paragraph 26, wherein the IgG4 antibody comprises an S228P mutation (EU numbering).
[2702] 28. The antibody of any one of paragraphs 1-27, wherein the antibody is a monospecific antibody.
[2703] 29. The antibody of any one of paragraphs 1-28, wherein the antibody is a multispecific antibody.
[2704] 30. The antibody of paragraph 29, wherein the antibody is a bispecific antibody.
[2705] 31. A polynucleotide encoding an isolated antibody of any one of paragraphs 1-30.
[2706] 32. A vector comprising the polynucleotide of paragraph 31.
[2707] 33. A host cell comprising the vector of paragraph 32.
[2708] 34. A method of producing the antibody of any one of paragraphs 1-33, the method comprising culturing a host cell that comprises the vector of paragraph 32 and recovering the antibody.
[2709] 35. The method of paragraph 34, wherein the host cell is prokaryotic.
[2710] 36. The method of paragraph 35, wherein the host cell is Escherichia coli.
[2711] 37. The method of paragraph 34, wherein the host cell is eukaryotic.
[2712] 38. The method of paragraph 37, wherein the host cell is a 293 cell, a CHO cell, a yeast cell, or a plant cell.
[2713] 39. A method for treating a patient who demonstrates a sensitivity to, or an allergic reaction against, a nut or a portion thereof or an extract thereof, or to Ara h 2 protein, or for treating at least one symptom or complication associated with a sensitivity to, or allergic reaction against a nut or a portion thereof or an extract thereof, or to Ara h 2, comprising administering an effective amount of one or more isolated antibodies or antigen-binding fragments thereof that bind specifically to Ara h 2, according to any of paragraphs 1-30.
[2714] 40. The method of paragraph 39, further comprising administering an effective amount of a second therapeutic agent useful for diminishing an allergic reaction an allergic reaction against, a nut or a portion thereof or an extract thereof, or to Ara h 2 protein.
[2715] 41. A method for detecting the presence of Ara h 2 neutralizing antibodies in a biological sample, comprising:
[2716] (a) providing a sample from a subject;
[2717] (b) contacting the sample with a mixture comprising:
   [2718] (i) the antibody of any one of paragraphs 1-30 and
   [2719] (ii) Ara h 2, or a fragment thereof; and
[2720] (c) detecting the binding of antibodies present in the biological sample to Ara h 2, or a fragment thereof.
[2721] 42. The method of paragraph 41, where antibody binding is detected using tandem bio-layer interferometry.
[2722] 43. The method of paragraphs 41 or 42, where the antibody from step (b) is bound to a solid support.
[2723] 44. The method of paragraphs 41 or 42, where Ara h 2, or a fragment thereof, is bound to a solid support.
[2724] 45. The method of paragraph 41, where antibody binding is detected using an enzyme-linked immunosorbent assay.

### 111BU7P1D5:

[2725] 1. An isolated antibody that binds to Ara h 2 (conglutin-7), or an antigen-binding fragment thereof, wherein the antibody comprises the following six complementarity determining regions (CDRs):
[2726] (a) an CDR-H1 comprising the amino acid sequence of (SEQ ID NO: 1560);
[2727] (b) an CDR-H2 comprising the amino acid sequence of (SEQ ID NO: 1561);
[2728] (c) an CDR-H3 comprising the amino acid sequence of (SEQ ID NO: 1562);
[2729] (d) an CDR-L1 comprising the amino acid sequence of (SEQ ID NO: 1563);
[2730] (e) an CDR-L2 comprising the amino acid sequence of (SEQ ID NO: 1564); and
[2731] (f) an CDR-L3 comprising the amino acid sequence of (SEQ ID NO: 1565).
[2732] 2. The antibody of paragraph 1, wherein the antibody comprises
[2733] (a) a heavy chain variable (VH) domain comprising an amino sequence having at least 90%, at least 95%, or at least 99% sequence identity to the amino acid sequence of SEQ ID NO: 1566;
[2734] (b) a light chain variable (VL) domain comprising an amino acid sequence having at least 90%, at least 95%, or at least 99% identity to the amino acid sequence of SEQ ID NO: 1567; or (c) a VH domain as in (a) and a VL domain as in (b).
[2735] 3. The antibody of paragraph 1 or 2, further comprising the following VH domain framework regions (FRs):
[2736] (a) an FR-H1 comprising the amino acid sequence of (SEQ ID NO: 1568);
[2737] (b) an FR-H2 comprising the amino acid sequence of (SEQ ID NO: 1569);
[2738] (c) an FR-H3 comprising the amino acid sequence of (SEQ ID NO: 1570); and
[2739] (d) an FR-H4 comprising the amino acid sequence of (SEQ ID NO: 1571).
[2740] 4. The antibody of any one of paragraphs 1-3, wherein the VH domain comprises the amino acid sequence of SEQ ID NO: 1566.
[2741] 5. The antibody of any one of paragraphs 1-4, further comprising the following VL domain FRs:
[2742] (a) an FR-L1 comprising the amino acid sequence of (SEQ ID NO: 1572);
[2743] (b) an FR-L2 comprising the amino acid sequence of (SEQ ID NO: 1573);
[2744] (c) an FR-L3 comprising the amino acid sequence of (SEQ ID NO: 1574); and
[2745] (d) an FR-L4 comprising the amino acid sequence of (SEQ ID NO: 1575).
[2746] 6. The antibody of any one of paragraphs 1-5, wherein the VL domain comprises the amino acid sequence of SEQ ID NO: 1567.
[2747] 7. An isolated antibody that binds to Ara h 2, or an antigen-binding fragment thereof, wherein the antibody comprises
[2748] (a) a VH domain comprising an amino acid sequence having at least 90%, at least 95%, or at least 99% sequence identity to the amino acid sequence of SEQ ID NO: 1566 and
[2749] (b) a VL domain comprising an amino acid sequence having at least 90%, at least 95%, or at least 99% sequence identity to the amino acid sequence of SEQ ID NO: 1567.
[2750] 8. The antibody of paragraph 7, wherein the antibody comprises a VH domain comprising the amino acid sequence of SEQ ID NO: 1566 and a VL domain comprising the amino acid sequence of SEQ ID NO: 1567.
[2751] 9. The antibody of any one of paragraphs 1-8, wherein the antibody comprises (a) a heavy chain comprising the amino acid sequence of SEQ ID NO: 1576 and (b) a light chain comprising the amino acid sequence of SEQ ID NO: 1577.
[2752] 10. The antibody of any one of paragraphs 1-9, wherein the antibody binds Ara h 2 with a K_{D} of about 50 nM or less.
[2753] 11. The method of paragraph 10, wherein the K_{D} is measured by a surface plasmon resonance assay.
[2754] 12. The antibody of paragraph 11, wherein the antibody binds Ara h 2 with a K_{D} of between about 0.1 pM and about 40 nM.
[2755] 13. The antibody of paragraph 12, wherein the antibody binds Ara h 2 with a K_{D} of between about 120 pM and about 20 nM.
[2756] 14. The antibody of paragraph 13, wherein the antibody binds Ara h 2 with a K_{D} of between about 120 pM and about 10 nM.
[2757] 15. The antibody of any one of paragraphs 1-14, wherein the antibody is capable neutralizing Ara h 2
[2758] 16. An antibody that binds to the same epitope as the antibody of any one of paragraph 1-15.
[2759] 17. An antibody that competes for binding to Ara h 2 with, or cross-blocks or is cross-blocked by, the antibody of any one of paragraphs 1-16.
[2760] 18. The antibody of paragraph 16 or 17, wherein whether the antibody binds to the same epitope or competes for binding to Ara h 2 is determined by an epitope binning assay.
[2761] 19. The antibody of any one of paragraphs 1-18, wherein the antibody is monoclonal.
[2762] 20. The antibody of any one of paragraphs 1-19, wherein the antibody is humanized.
[2763] 21. The antibody of any one of paragraphs 1-20, wherein the antibody is an antibody fragment that binds Ara h 2.
[2764] 22. The antibody of paragraph 21, wherein the antibody fragment is selected from the group consisting of Fab, Fab′-SH, Fv, scFv, and (Fab′)₂ fragments.
[2765] 23. The antibody of any one of paragraphs 1-22, wherein the antibody is a full-length antibody.
[2766] 24. The antibody of paragraph 23, wherein the antibody is an IgG antibody.
[2767] 25. The antibody of paragraph 24, wherein the IgG antibody is an IgG1 antibody.
[2768] 26. The antibody of paragraph 25, wherein the IgG antibody is an IgG4 antibody.
[2769] 27. The antibody of paragraph 26, wherein the IgG4 antibody comprises an S228P mutation (EU numbering).
[2770] 28. The antibody of any one of paragraphs 1-27, wherein the antibody is a monospecific antibody.
[2771] 29. The antibody of any one of paragraphs 1-28, wherein the antibody is a multispecific antibody.
[2772] 30. The antibody of paragraph 29, wherein the antibody is a bispecific antibody.
[2773] 31. A polynucleotide encoding an isolated antibody of any one of paragraphs 1-30.
[2774] 32. A vector comprising the polynucleotide of paragraph 31.
[2775] 33. A host cell comprising the vector of paragraph 32.
[2776] 34. A method of producing the antibody of any one of paragraphs 1-33, the method comprising culturing a host cell that comprises the vector of paragraph 32 and recovering the antibody.
[2777] 35. The method of paragraph 34, wherein the host cell is prokaryotic.
[2778] 36. The method of paragraph 35, wherein the host cell is Escherichia coli.
[2779] 37. The method of paragraph 34, wherein the host cell is eukaryotic.
[2780] 38. The method of paragraph 37, wherein the host cell is a 293 cell, a CHO cell, a yeast cell, or a plant cell.
[2781] 39. A method for treating a patient who demonstrates a sensitivity to, or an allergic reaction against, a nut or a portion thereof or an extract thereof, or to Ara h 2 protein, or for treating at least one symptom or complication associated with a sensitivity to, or allergic reaction against a nut or a portion thereof or an extract thereof, or to Ara h 2, comprising administering an effective amount of one or more isolated antibodies or antigen-binding fragments thereof that bind specifically to Ara h 2, according to any of paragraphs 1-30.
[2782] 40. The method of paragraph 39, further comprising administering an effective amount of a second therapeutic agent useful for diminishing an allergic reaction an allergic reaction against, a nut or a portion thereof or an extract thereof, or to Ara h 2 protein.
[2783] 41. A method for detecting the presence of Ara h 2 neutralizing antibodies in a biological sample, comprising:
[2784] (a) providing a sample from a subject;
[2785] (b) contacting the sample with a mixture comprising:
   [2786] (i) the antibody of any one of paragraphs 1-30 and
   [2787] (ii) Ara h 2, or a fragment thereof; and
[2788] (c) detecting the binding of antibodies present in the biological sample to Ara h 2, or a fragment thereof.
[2789] 42. The method of paragraph 41, where antibody binding is detected using tandem bio-layer interferometry.
[2790] 43. The method of paragraphs 41 or 42, where the antibody from step (b) is bound to a solid support.
[2791] 44. The method of paragraphs 41 or 42, where Ara h 2, or a fragment thereof, is bound to a solid support.
[2792] 45. The method of paragraph 41, where antibody binding is detected using an enzyme-linked immunosorbent assay.

### 29BU7P1D1:

[2793] 1. An isolated antibody that binds to Ara h 2 (conglutin-7), or an antigen-binding fragment thereof, wherein the antibody comprises the following six complementarity determining regions (CDRs):
[2794] (a) an CDR-H1 comprising the amino acid sequence of (SEQ ID NO: 1660);
[2795] (b) an CDR-H2 comprising the amino acid sequence of (SEQ ID NO: 1661);
[2796] (c) an CDR-H3 comprising the amino acid sequence of (SEQ ID NO: 1562);
[2797] (d) an CDR-L1 comprising the amino acid sequence of (SEQ ID NO: 1663);
[2798] (e) an CDR-L2 comprising the amino acid sequence of (SEQ ID NO: 1664); and
[2799] (f) an CDR-L3 comprising the amino acid sequence of (SEQ ID NO: 1665).
[2800] 2. The antibody of paragraph 1, wherein the antibody comprises
[2801] (a) a heavy chain variable (VH) domain comprising an amino sequence having at least 90%, at least 95%, or at least 99% sequence identity to the amino acid sequence of SEQ ID NO: 1666;
[2802] (b) a light chain variable (VL) domain comprising an amino acid sequence having at least 90%, at least 95%, or at least 99% identity to the amino acid sequence of SEQ ID NO: 1667; or (c) a VH domain as in
[2803] (a) and a VL domain as in (b).
[2804] 3. The antibody of paragraph 1 or 2, further comprising the following VH domain framework regions (FRs):
[2805] (a) an FR-H1 comprising the amino acid sequence of (SEQ ID NO: 1668);
[2806] (b) an FR-H2 comprising the amino acid sequence of (SEQ ID NO: 1669);
[2807] (c) an FR-H3 comprising the amino acid sequence of (SEQ ID NO: 1670); and
[2808] (d) an FR-H4 comprising the amino acid sequence of (SEQ ID NO: 1671).
[2809] 4. The antibody of any one of paragraphs 1-3, wherein the VH domain comprises the amino acid sequence of SEQ ID NO: 1666.
[2810] 5. The antibody of any one of paragraphs 1-4, further comprising the following VL domain FRs:
[2811] (a) an FR-L1 comprising the amino acid sequence of (SEQ ID NO: 1672);
[2812] (b) an FR-L2 comprising the amino acid sequence of (SEQ ID NO: 1673);
[2813] (c) an FR-L3 comprising the amino acid sequence of (SEQ ID NO: 1674); and
[2814] (d) an FR-L4 comprising the amino acid sequence of (SEQ ID NO: 1675).
[2815] 6. The antibody of any one of paragraphs 1-5, wherein the VL domain comprises the amino acid sequence of SEQ ID NO: 1667.
[2816] 7. An isolated antibody that binds to Ara h 2, or an antigen-binding fragment thereof, wherein the antibody comprises
[2817] (a) a VH domain comprising an amino acid sequence having at least 90%, at least 95%, or at least 99% sequence identity to the amino acid sequence of SEQ ID NO: 1666 and
[2818] (b) a VL domain comprising an amino acid sequence having at least 90%, at least 95%, or at least 99% sequence identity to the amino acid sequence of SEQ ID NO: 1667.
[2819] 8. The antibody of paragraph 7, wherein the antibody comprises a VH domain comprising the amino acid sequence of SEQ ID NO: 1566 and a VL domain comprising the amino acid sequence of SEQ ID NO: 1667.
[2820] 9. The antibody of any one of paragraphs 1-8, wherein the antibody comprises (a) a heavy chain comprising the amino acid sequence of SEQ ID NO: 1676 and (b) a light chain comprising the amino acid sequence of SEQ ID NO: 1677.
[2821] 10. The antibody of any one of paragraphs 1-9, wherein the antibody binds Ara h 2 with a K_{D} of about 50 nM or less.
[2822] 11. The method of paragraph 10, wherein the K_{D} is measured by a surface plasmon resonance assay.
[2823] 12. The antibody of paragraph 11, wherein the antibody binds Ara h 2 with a K_{D} of between about 0.1 pM and about 40 nM.
[2824] 13. The antibody of paragraph 12, wherein the antibody binds Ara h 2 with a K_{D} of between about 120 pM and about 20 nM.
[2825] 14. The antibody of paragraph 13, wherein the antibody binds Ara h 2 with a K_{D} of between about 120 pM and about 10 nM.
[2826] 15. The antibody of any one of paragraphs 1-14, wherein the antibody is capable neutralizing Ara h 2
[2827] 16. An antibody that binds to the same epitope as the antibody of any one of paragraph 1-15.
[2828] 17. An antibody that competes for binding to Ara h 2 with, or cross-blocks or is cross-blocked by, the antibody of any one of paragraphs 1-16.
[2829] 18. The antibody of paragraph 16 or 17, wherein whether the antibody binds to the same epitope or competes for binding to Ara h 2 is determined by an epitope binning assay.
[2830] 19. The antibody of any one of paragraphs 1-18, wherein the antibody is monoclonal.
[2831] 20. The antibody of any one of paragraphs 1-19, wherein the antibody is humanized.
[2832] 21. The antibody of any one of paragraphs 1-20, wherein the antibody is an antibody fragment that binds Ara h 2.
[2833] 22. The antibody of paragraph 21, wherein the antibody fragment is selected from the group consisting of Fab, Fab′-SH, Fv, scFv, and (Fab′)₂ fragments.
[2834] 23. The antibody of any one of paragraphs 1-22, wherein the antibody is a full-length antibody.
[2835] 24. The antibody of paragraph 23, wherein the antibody is an IgG antibody.
[2836] 25. The antibody of paragraph 24, wherein the IgG antibody is an IgG1 antibody.
[2837] 26. The antibody of paragraph 25, wherein the IgG antibody is an IgG4 antibody.
[2838] 27. The antibody of paragraph 26, wherein the IgG4 antibody comprises an S228P mutation (EU numbering).
[2839] 28. The antibody of any one of paragraphs 1-27, wherein the antibody is a monospecific antibody.
[2840] 29. The antibody of any one of paragraphs 1-28, wherein the antibody is a multispecific antibody.
[2841] 30. The antibody of paragraph 29, wherein the antibody is a bispecific antibody.
[2842] 31. A polynucleotide encoding an isolated antibody of any one of paragraphs 1-30.
[2843] 32. A vector comprising the polynucleotide of paragraph 31.
[2844] 33. A host cell comprising the vector of paragraph 32.
[2845] 34. A method of producing the antibody of any one of paragraphs 1-33, the method comprising culturing a host cell that comprises the vector of paragraph 32 and recovering the antibody.
[2846] 35. The method of paragraph 34, wherein the host cell is prokaryotic.
[2847] 36. The method of paragraph 35, wherein the host cell is Escherichia coli.
[2848] 37. The method of paragraph 34, wherein the host cell is eukaryotic.
[2849] 38. The method of paragraph 37, wherein the host cell is a 293 cell, a CHO cell, a yeast cell, or a plant cell.
[2850] 39. A method for treating a patient who demonstrates a sensitivity to, or an allergic reaction against, a nut or a portion thereof or an extract thereof, or to Ara h 2 protein, or for treating at least one symptom or complication associated with a sensitivity to, or allergic reaction against a nut or a portion thereof or an extract thereof, or to Ara h 2, comprising administering an effective amount of one or more isolated antibodies or antigen-binding fragments thereof that bind specifically to Ara h 2, according to any of paragraphs 1-30.
[2851] 40. The method of paragraph 39, further comprising administering an effective amount of a second therapeutic agent useful for diminishing an allergic reaction an allergic reaction against, a nut or a portion thereof or an extract thereof, or to Ara h 2 protein.
[2852] 41. A method for detecting the presence of Ara h 2 neutralizing antibodies in a biological sample, comprising:
[2853] (a) providing a sample from a subject;
[2854] (b) contacting the sample with a mixture comprising:
   [2855] (i) the antibody of any one of paragraphs 1-30 and
   [2856] (ii) Ara h 2, or a fragment thereof; and
[2857] (c) detecting the binding of antibodies present in the biological sample to Ara h 2, or a fragment thereof.
[2858] 42. The method of paragraph 41, where antibody binding is detected using tandem bio-layer interferometry.
[2859] 43. The method of paragraphs 41 or 42, where the antibody from step (b) is bound to a solid support.
[2860] 44. The method of paragraphs 41 or 42, where Ara h 2, or a fragment thereof, is bound to a solid support.
[2861] 45. The method of paragraph 41, where antibody binding is detected using an enzyme-linked immunosorbent assay.

### Compositions and Methods

[2862] 1. A pharmaceutical composition comprising a therapeutically effective amount of one or more isolated antibodies, or antigen-binding fragments thereof, as is described in Table 8, together with one or more pharmaceutically acceptable excipients.
[2863] 2. A method for treating a patient who demonstrates a sensitivity to a peanut allergen, an allergic reaction against a peanut allergen, or to Ara h 2 protein, or for treating at least one symptom or complication associated with a sensitivity to, or allergic reaction against a peanut allergen, an allergic reaction against a peanut allergen, or to Ara h 2 protein, comprising administering an effective amount of one or more isolated human monoclonal antibodies or antigen-binding fragments thereof that bind specifically to Ara h 2, according to paragraphs described above to a patient in need thereof, wherein the sensitivity to, or an allergic reaction against, to a peanut allergen, an allergic reaction against a peanut allergen, or to Ara h 2 protein, is lessened in severity and/or duration, or at least one symptom or complication associated with the sensitivity to, or allergic reaction against, to a peanut allergen, an allergic reaction against a peanut allergen, or to Ara h 2 protein is ameliorated, or that the frequency and/or duration of, or the severity of the sensitivity to or allergic reaction against, to a peanut allergen, an allergic reaction against a peanut allergen, or to Ara h 2 protein, is reduced following administration of one or more of the isolated human monoclonal antibodies or fragments thereof that bind specifically to Ara h 2.
[2864] 3. The method of paragraph 2, further comprising administering an effective amount of a second therapeutic agent useful for diminishing an allergic reaction to a peanut allergen, an allergic reaction against a peanut allergen, or to Ara h 2 protein.
[2865] 4. The method of paragraph 3, wherein the second therapeutic agent is selected from the group consisting of a corticosteroid, a bronchial dilator, an antihistamine, epinephrine, or a decongestant.
[2866] 5. The method of paragraph 2, wherein the treatment results in a reduction in allergic rhinitis, allergic conjunctivitis, allergic asthma, or an anaphylactic response following exposure, direct or indirect, of the patient to a peanut allergen, an allergic reaction against a peanut allergen, or to Ara h 2 protein.

[2867] Other embodiments are within the claims.

The application's sequence listing, which the Patent Office published only in electronic form, follows.

SEQUENCE LISTING (1887 sequences)

SEQ ID NO: 1 - protein, 8 aa, Artificial Sequence
  Synthetic Construct
GFIFADYT

SEQ ID NO: 2 - protein, 8 aa, Artificial Sequence
  Synthetic Construct
ISWNSGGV

SEQ ID NO: 3 - protein, 11 aa, Artificial Sequence
  Synthetic Construct
VKDNGYRAFDL

SEQ ID NO: 4 - protein, 11 aa, Artificial Sequence
  Synthetic Construct
QSLVHSNGYNY

SEQ ID NO: 5 - protein, 3 aa, Artificial Sequence
  Synthetic Construct
MGS

SEQ ID NO: 6 - protein, 8 aa, Artificial Sequence
  Synthetic Construct
MQSLQTWT

SEQ ID NO: 7 - protein, 118 aa, Artificial Sequence
  Synthetic Construct
QVQLVESGGGLVQPGRSLRLSCAASGFIFADYTMHWVRQSPGKDLEWVSRISWNSGGVEYADSVKGRFTISRDNAKNSLYLQMNSLRVEDTALYYCVKDNGYRAFDLWGLGTMVTVSS

SEQ ID NO: 8 - protein, 111 aa, Artificial Sequence
  Synthetic Construct
DVVMTQSPVSLPVTPGEPASISCRSSQSLVHSNGYNYLDWYLQKPGQSPQLLIYMGSNRASGVPDRFSGSGSGTDFTLKISRVEAEDVGVYYCMQSLQTWTFGQGTKVEIK

SEQ ID NO: 9 - protein, 25 aa, Artificial Sequence [sequence omitted]

SEQ ID NO: 10 - protein, 17 aa, Artificial Sequence
  Synthetic Construct
MHWVRQSPGKDLEWVSR

SEQ ID NO: 11 - protein, 38 aa, Artificial Sequence
  Synthetic Construct
EYADSVKGRFTISRDNAKNSLYLQMNSLRVEDTALYYC

SEQ ID NO: 12 - protein, 11 aa, Artificial Sequence
  Synthetic Construct
WGLGTMVTVSS

SEQ ID NO: 13 - protein, 26 aa, Artificial Sequence
  Synthetic Construct
DVVMTQSPVSLPVTPGEPASISCRSS

SEQ ID NO: 14 - protein, 17 aa, Artificial Sequence
  Synthetic Construct
LDWYLQKPGQSPQLLIY

SEQ ID NO: 15 - protein, 36 aa, Artificial Sequence
  Synthetic Construct
NRASGVPDRFSGSGSGTDFTLKISRVEAEDVGVYYC

SEQ ID NO: 16 - protein, 10 aa, Artificial Sequence
  Synthetic Construct
FGQGTKVEIK

SEQ ID NO: 17 - protein, 445 aa, Artificial Sequence
  Synthetic Construct
  misc_feature (142)..(142): Xaa can be any naturally occurring amino acid
  misc_feature (212)..(212): Xaa can be any naturally occurring amino acid
  misc_feature (356)..(356): Xaa can be any naturally occurring amino acid
QVQLVESGGGLVQPGRSLRLSCAASGFIFADYTMHWVRQSPGKDLEWVSRISWNSGGVEYADSVKGRFTISRDNAKNSLYLQMNSLRVEDTALYYCVKDNGYRAFDLWGLGTMVTVSSKGPSVFPLAPSSKSTSGGTAALGXLVKDYFPEPVTVSWNSGALTSGVHTFPAVLQSSGLYSLSSVVTVPSSSLGTQTYICNVNHKPSNTKVDKXVEPKSCDKTHTCPPCPAPELLGGPSVFLFPPKPKDTLMISRTPEVTCVVVDVSHEDPEVKFNWYVDGVEVHNAKTKPREEQYNSTYRVVSVLTVLHQDWLNGKEYKCKVSNKALPAPIEKTISKAKGQPREPQVYTLPPSRDEXTKNQVSLTCLVKGFYPSDIAVEWESNGQPENNYKTTPPVLDSDGSFFLYSKLTVDKSRWQQGNVFSCSVMHEALHNHYTQKSLSLSPGK

SEQ ID NO: 18 - protein, 215 aa, Artificial Sequence
  Synthetic Construct
DVVMTQSPVSLPVTPGEPASISCRSSQSLVHSNGYNYLDWYLQKPGQSPQLLIYMGSNRASGVPDRFSGSGSGTDFTLKISRVEAEDVGVYYCMQSLQTWTFGQGTKVEIKAPSVFIFPPSDEQLKSGTASVVCLLNNFYPREAKVQWKVDNALQSGNSQESVTEQDSKDSTYSLSSTLTLSKADYEKHKVYACEVTHQGLSSPVTKSFNRGECK

SEQ ID NO: 19 - DNA, 355 bp, Artificial Sequence
  Synthetic Construct
caggtgcagctggtggagtctgggggaggcttggtacaacctggcaggtccctgagactctcctgtgcagcctctggattcatttttgccgattataccatgcactgggtccggcaaagtccagggaaggacctggagtgggtctctagaattagttggaatagtgggggcgtagagtatgcggactctgtgaagggccgattcaccatctccagagacaacgccaagaactccctctatcttcaaatgaacagtctgagagttgaagacacggccttatattactgtgtaaaagataatggttatcgtgcatttgatctttggggcctagggacaatggtcaccgtctcttcag

SEQ ID NO: 20 - DNA, 334 bp, Artificial Sequence
  Synthetic Construct
gatgttgtgatgactcagtctccagtctccctgcccgtcacccctggagagccggcctccatctcctgcaggtctagtcagagcctcgtgcatagtaatggatacaactatttggattggtacctgcagaagccagggcagtctccacagctcctgatctatatgggttcaaatcgggcctccggggtccctgacaggttcagtggcagtggatcaggcacagattttacactgaaaatcagcagagtggaggctgaggatgttggagtttattactgcatgcaaagtctacaaacgtggacgttcggccaagggaccaaggtggaaatcaaac

SEQ ID NO: 21 - protein, 8 aa, Artificial Sequence
  Synthetic Construct
GFSFEDYG

SEQ ID NO: 22 - protein, 8 aa, Artificial Sequence
  Synthetic Construct
INWNGQST

SEQ ID NO: 23 - protein, 17 aa, Artificial Sequence
  Synthetic Construct
ARVGRGVTGGGIRAFDI

SEQ ID NO: 24 - protein, 7 aa, Artificial Sequence
  Synthetic Construct
QSISSDY

SEQ ID NO: 25 - protein, 3 aa, Artificial Sequence
  Synthetic Construct
GAS

SEQ ID NO: 26 - protein, 10 aa, Artificial Sequence
  Synthetic Construct
QKYSNSPVIT

SEQ ID NO: 27 - protein, 124 aa, Artificial Sequence
  Synthetic Construct
  misc_feature (1)..(1): Xaa can be any naturally occurring amino acid
XVQLVESGGSLVRPGGSVRLSCTASGFSFEDYGMTWVRQGPGMGLEWVSGINWNGQSTGYTDSVKGRFTISRDDAKNSLHLQMNNLRVEDTALYYCARVGRGVTGGGIRAFDIWGQGTMVTVSP

SEQ ID NO: 28 - protein, 109 aa, Artificial Sequence
  Synthetic Construct
  misc_feature (3)..(4): Xaa can be any naturally occurring amino acid
EIXXTQSPGTLSMSPGERATLSCRASQSISSDYLAWYQHKPGQAPRLLIYGASSRATGIPDRFSGSGSGTDFTLTISRLEPEDFAVYYCQKYSNSPVITFGQGTRLEIK

SEQ ID NO: 29 - protein, 25 aa, Artificial Sequence
  Synthetic Construct
  misc_feature (1)..(1): Xaa can be any naturally occurring amino acid
XVQLVESGGSLVRPGGSVRLSCTAS

SEQ ID NO: 30 - protein, 17 aa, Artificial Sequence
  Synthetic Construct
MTWVRQGPGMGLEWVSG

SEQ ID NO: 31 - protein, 38 aa, Artificial Sequence
  Synthetic Construct
GYTDSVKGRFTISRDDAKNSLHLQMNNLRVEDTALYYC

SEQ ID NO: 32 - protein, 11 aa, Artificial Sequence
  Synthetic Construct
WGQGTMVTVSP

SEQ ID NO: 33 - protein, 26 aa, Artificial Sequence
  Synthetic Construct
  misc_feature (3)..(4): Xaa can be any naturally occurring amino acid
EIXXTQSPGTLSMSPGERATLSCRAS

SEQ ID NO: 34 - protein, 17 aa, Artificial Sequence
  Synthetic Construct
LAWYQHKPGQAPRLLIY

SEQ ID NO: 35 - protein, 36 aa, Artificial Sequence [sequence omitted]

SEQ ID NO: 36 - protein, 10 aa, Artificial Sequence
  Synthetic Construct
FGQGTRLEIK

SEQ ID NO: 37 - protein, 451 aa, Artificial Sequence
  Synthetic Construct
  misc_feature (1)..(1): Xaa can be any naturally occurring amino acid
  misc_feature (148)..(148): Xaa can be any naturally occurring amino acid
  misc_feature (218)..(218): Xaa can be any naturally occurring amino acid
  misc_feature (362)..(362): Xaa can be any naturally occurring amino acid
XVQLVESGGSLVRPGGSVRLSCTASGFSFEDYGMTWVRQGPGMGLEWVSGINWNGQSTGYTDSVKGRFTISRDDAKNSLHLQMNNLRVEDTALYYCARVGRGVTGGGIRAFDIWGQGTMVTVSPKGPSVFPLAPSSKSTSGGTAALGXLVKDYFPEPVTVSWNSGALTSGVHTFPAVLQSSGLYSLSSVVTVPSSSLGTQTYICNVNHKPSNTKVDKXVEPKSCDKTHTCPPCPAPELLGGPSVFLFPPKPKDTLMISRTPEVTCVVVDVSHEDPEVKFNWYVDGVEVHNAKTKPREEQYNSTYRVVSVLTVLHQDWLNGKEYKCKVSNKALPAPIEKTISKAKGQPREPQVYTLPPSRDEXTKNQVSLTCLVKGFYPSDIAVEWESNGQPENNYKTTPPVLDSDGSFFLYSKLTVDKSRWQQGNVFSCSVMHEALHNHYTQKSLSLSPGK

SEQ ID NO: 38 - protein, 211 aa, Artificial Sequence
  Synthetic Construct
  misc_feature (3)..(3): Xaa can be any naturally occurring amino acid
EIXLTQSPATLSLSPGERATLSCRASQSLGNYLAWYQQKPGQAPRLLIYDASDRATGIPARFSGSGSGTDFTLTISSLEPEDFAVYYCQQRSQFMWTFGQGTKVEIKAPSVFIFPPSDEQLKSGTASVVCLLNNFYPREAKVQWKVDNALQSGNSQESVTEQDSKDSTYSLSSTLTLSKADYEKHKVYACEVTHQGLSSPVTKSFNRGECK

SEQ ID NO: 39 - DNA, 373 bp, Artificial Sequence
  Synthetic Construct
  misc_feature (1)..(3): n is a, c, g, t or u
nnngtgcagctggtggagtcggggggaagtttggtacggccgggggggtccgtgagactctcctgtacagcctctggatttagttttgaagactatggcatgacctgggtccgccaaggtccagggatggggctggagtgggtctccggtattaattggaatggtcagagtacaggttacacagactctgtgaagggccgattcaccatctccagagacgacgccaagaactccctgcatctacaaatgaacaatctgagagtcgaggatacggccctatattattgtgcgagagtagggaggggagttactggcgggggaatcagggcttttgacatctggggccaagggacaatggtcaccgtctctccag

SEQ ID NO: 40 - DNA, 322 bp, Artificial Sequence
  Synthetic Construct
  misc_feature (8)..(8): n is a, c, g, t or u
gaaattgngttgacgcagtctccagccaccctgtctttgtctccaggggaaagagccactctctcctgcagggccagtcagagtcttggcaactacttagcctggtaccaacagaaacctggccaggctcccaggctcctcatctatgatgcatccgaccgggccactggcatcccagccaggttcagtggcagtgggtctgggacagacttcactctcaccatcagcagccttgagcctgaagattttgcagtttattactgtcagcagcgtagccaatttatgtggacgttcggccaagggaccaaggtggaaatcaaac

SEQ ID NO: 41 - protein, 8 aa, Artificial Sequence
  Synthetic Construct
GFTFTRYA

SEQ ID NO: 42 - protein, 8 aa, Artificial Sequence
  Synthetic Construct
ISHDGGTK

SEQ ID NO: 43 - protein, 18 aa, Artificial Sequence
  Synthetic Construct
AKTCSSPSCYDTAYYFDY

SEQ ID NO: 44 - protein, 6 aa, Artificial Sequence
  Synthetic Construct
QSLGNY

SEQ ID NO: 45 - protein, 3 aa, Artificial Sequence
  Synthetic Construct
DAS

SEQ ID NO: 46 - protein, 9 aa, Artificial Sequence
  Synthetic Construct
QQRSQFMWT

SEQ ID NO: 47 - protein, 125 aa, Artificial Sequence
  Synthetic Construct
QVQLVESGGGVVQPGRSLRLSCVVSGFTFTRYAFHWVRQAPGKGLEWVAVISHDGGTKNYADSVEGRFTISRDNSESALYLQMNSLRPEDTAIYYCAKTCSSPSCYDTAYYFDYWGQGTPVTVSS

SEQ ID NO: 48 - protein, 107 aa, Artificial Sequence
  Synthetic Construct
  misc_feature (3)..(3): Xaa can be any naturally occurring amino acid
EIXLTQSPATLSLSPGERATLSCRASQSLGNYLAWYQQKPGQAPRLLIYDASDRATGIPARFSGSGSGTDFTLTISSLEPEDFAVYYCQQRSQFMWTFGQGTKVEIK

SEQ ID NO: 49 - protein, 25 aa, Artificial Sequence
  Synthetic Construct
QVQLVESGGGVVQPGRSLRLSCVVS

SEQ ID NO: 50 - protein, 17 aa, Artificial Sequence
  Synthetic Construct
FHWVRQAPGKGLEWVAV

SEQ ID NO: 51 - protein, 38 aa, Artificial Sequence
  Synthetic Construct
NYADSVEGRFTISRDNSESALYLQMNSLRPEDTAIYYC

SEQ ID NO: 52 - protein, 11 aa, Artificial Sequence
  Synthetic Construct
WGQGTPVTVSS

SEQ ID NO: 53 - protein, 26 aa, Artificial Sequence
  Synthetic Construct
  misc_feature (3)..(3): Xaa can be any naturally occurring amino acid
EIXLTQSPATLSLSPGERATLSCRAS

SEQ ID NO: 54 - protein, 17 aa, Artificial Sequence
  Synthetic Construct
LAWYQQKPGQAPRLLIY

SEQ ID NO: 55 - protein, 36 aa, Artificial Sequence
  Synthetic Construct
DRATGIPARFSGSGSGTDFTLTISSLEPEDFAVYYC

SEQ ID NO: 56 - protein, 10 aa, Artificial Sequence
  Synthetic Construct
FGQGTKVEIK

SEQ ID NO: 57 - protein, 452 aa, Artificial Sequence
  Synthetic Construct
  misc_feature (149)..(149): Xaa can be any naturally occurring amino acid
  misc_feature (219)..(219): Xaa can be any naturally occurring amino acid
  misc_feature (363)..(363): Xaa can be any naturally occurring amino acid
QVQLVESGGGVVQPGRSLRLSCVVSGFTFTRYAFHWVRQAPGKGLEWVAVISHDGGTKNYADSVEGRFTISRDNSESALYLQMNSLRPEDTAIYYCAKTCSSPSCYDTAYYFDYWGQGTPVTVSSKGPSVFPLAPSSKSTSGGTAALGXLVKDYFPEPVTVSWNSGALTSGVHTFPAVLQSSGLYSLSSVVTVPSSSLGTQTYICNVNHKPSNTKVDKXVEPKSCDKTHTCPPCPAPELLGGPSVFLFPPKPKDTLMISRTPEVTCVVVDVSHEDPEVKFNWYVDGVEVHNAKTKPREEQYNSTYRVVSVLTVLHQDWLNGKEYKCKVSNKALPAPIEKTISKAKGQPREPQVYTLPPSRDEXTKNQVSLTCLVKGFYPSDIAVEWESNGQPENNYKTTPPVLDSDGSFFLYSKLTVDKSRWQQGNVFSCSVMHEALHNHYTQKSLSLSPGK

SEQ ID NO: 58 - protein, 212 aa, Artificial Sequence
  Synthetic Construct
  misc_feature (3)..(4): Xaa can be any naturally occurring amino acid
EIXXTQSPGTLSLSPGERATLSCTASQRVNSDSVAWYQQRPGLAPRLLIYDASHRATGIPDRFSGGRGGTGFTLTIRALEPEDFAVYYCQQYGESPLTFGQGTKVEIKAPSVFIFPPSDEQLKSGTASVVCLLNNFYPREAKVQWKVDNALQSGNSQESVTEQDSKDSTYSLSSTLTLSKADYEKHKVYACEVTHQGLSSPVTKSFNRGECK

SEQ ID NO: 59 - DNA, 376 bp, Artificial Sequence
  Synthetic Construct
caggtgcagctggtggagtctgggggaggcgtggtccagcctgggaggtccctgagactctcctgtgtagtctctggattcaccttcactaggtatgcttttcactgggtccgccaggctccaggcaaggggctggagtgggtggcagttatatcacatgatggaggcactaaaaactacgcagactccgtggagggccgattcaccatctccagagacaattccgagagcgcactctatctgcaaatgaacagcctgagacctgaggacacggctatatattactgtgcgaaaacttgtagtagtcccagttgttatgatacggcatactactttgactactggggccagggaaccccggtcaccgtctcctcag

SEQ ID NO: 60 - DNA, 325 bp, Artificial Sequence
  Synthetic Construct
  misc_feature (8)..(8): n is a, c, g, t or u
  misc_feature (11)..(11): n is a, c, g, t or u
gaaatagngtngacgcagtctccaggcaccctgtctttgtctccaggcgagagggccaccctctcctgcacggccagtcagagagtgaatagcgactccgtagcctggtatcagcagagacctggcctggcgcccaggctcctcatctatgatgcatcccacagggccactggcatcccagacaggttcagtggcggtaggggtgggacaggcttcactctcaccatcagggcactggagcctgaagattttgcagtatattactgtcaacagtatggtgagtcacctctaacgttcggccaagggaccaaggtggaaatcaaac

SEQ ID NO: 61 - protein, 8 aa, Artificial Sequence
  Synthetic Construct
GFSFTGSA

SEQ ID NO: 62 - protein, 10 aa, Artificial Sequence
  Synthetic Construct
VQSYSHSFAT

SEQ ID NO: 63 - protein, 16 aa, Artificial Sequence
  Synthetic Construct
TRPFSGYDLMSDFFPN

SEQ ID NO: 64 - protein, 7 aa, Artificial Sequence
  Synthetic Construct
QRVNSDS

SEQ ID NO: 65 - protein, 3 aa, Artificial Sequence
  Synthetic Construct
DAS

SEQ ID NO: 66 - protein, 9 aa, Artificial Sequence
  Synthetic Construct
QQYGESPLT

SEQ ID NO: 67 - protein, 125 aa, Artificial Sequence
  Synthetic Construct
  misc_feature (1)..(1): Xaa can be any naturally occurring amino acid
  misc_feature (3)..(3): Xaa can be any naturally occurring amino acid
XCXLVESGGDLVQPGGSLKLSCATSGFSFTGSAIHWVRQSSGKGLEWLGRVQSYSHSFATAYSASLEGRFTISRDESENTAYLQMNSLKPEDTAVYYCTRPFSGYDLMSDFFPNWGQGTLVTVSS

SEQ ID NO: 68 - protein, 108 aa, Artificial Sequence
  Synthetic Construct
  misc_feature (3)..(4): Xaa can be any naturally occurring amino acid
EIXXTQSPGTLSLSPGERATLSCTASQRVNSDSVAWYQQRPGLAPRLLIYDASHRATGIPDRFSGGRGGTGFTLTIRALEPEDFAVYYCQQYGESPLTFGQGTKVEIK

SEQ ID NO: 69 - protein, 25 aa, Artificial Sequence
  Synthetic Construct
  misc_feature (1)..(1): Xaa can be any naturally occurring amino acid
  misc_feature (3)..(3): Xaa can be any naturally occurring amino acid
XCXLVESGGDLVQPGGSLKLSCATS

SEQ ID NO: 70 - protein, 17 aa, Artificial Sequence
  Synthetic Construct
IHWVRQSSGKGLEWLGR

SEQ ID NO: 71 - protein, 38 aa, Artificial Sequence
  Synthetic Construct
AYSASLEGRFTISRDESENTAYLQMNSLKPEDTAVYYC

SEQ ID NO: 72 - protein, 11 aa, Artificial Sequence
  Synthetic Construct
WGQGTLVTVSS

SEQ ID NO: 73 - protein, 26 aa, Artificial Sequence
  Synthetic Construct
  misc_feature (3)..(4): Xaa can be any naturally occurring amino acid
EIXXTQSPGTLSLSPGERATLSCTAS

SEQ ID NO: 74 - protein, 17 aa, Artificial Sequence
  Synthetic Construct
VAWYQQRPGLAPRLLIY

SEQ ID NO: 75 - protein, 36 aa, Artificial Sequence
  Synthetic Construct
HRATGIPDRFSGGRGGTGFTLTIRALEPEDFAVYYC

SEQ ID NO: 76 - protein, 10 aa, Artificial Sequence
  Synthetic Construct
FGQGTKVEIK

SEQ ID NO: 77 - protein, 452 aa, Artificial Sequence
  Synthetic Construct
  misc_feature (1)..(1): Xaa can be any naturally occurring amino acid
  misc_feature (3)..(3): Xaa can be any naturally occurring amino acid
  misc_feature (149)..(149): Xaa can be any naturally occurring amino acid
  misc_feature (219)..(219): Xaa can be any naturally occurring amino acid
  misc_feature (363)..(363): Xaa can be any naturally occurring amino acid
XCXLVESGGDLVQPGGSLKLSCATSGFSFTGSAIHWVRQSSGKGLEWLGRVQSYSHSFATAYSASLEGRFTISRDESENTAYLQMNSLKPEDTAVYYCTRPFSGYDLMSDFFPNWGQGTLVTVSSKGPSVFPLAPSSKSTSGGTAALGXLVKDYFPEPVTVSWNSGALTSGVHTFPAVLQSSGLYSLSSVVTVPSSSLGTQTYICNVNHKPSNTKVDKXVEPKSCDKTHTCPPCPAPELLGGPSVFLFPPKPKDTLMISRTPEVTCVVVDVSHEDPEVKFNWYVDGVEVHNAKTKPREEQYNSTYRVVSVLTVLHQDWLNGKEYKCKVSNKALPAPIEKTISKAKGQPREPQVYTLPPSRDEXTKNQVSLTCLVKGFYPSDIAVEWESNGQPENNYKTTPPVLDSDGSFFLYSKLTVDKSRWQQGNVFSCSVMHEALHNHYTQKSLSLSPGK

SEQ ID NO: 78 - protein, 216 aa, Artificial Sequence
  Synthetic Construct
  misc_feature (3)..(3): Xaa can be any naturally occurring amino acid
GCXVTQSPISLPVTPGEPASISCRSSQSLIHSNGYNYLDWYLQKPGQSPQLLISLGSKRASGVPERFSGSGSGTDFTLKISRVEAEDVGIYYCMQALQTPWTFGQGTKVEIKAPSVFIFPPSDEQLKSGTASVVCLLNNFYPREAKVQWKVDNALQSGNSQESVTEQDSKDSTYSLSSTLTLSKADYEKHKVYACEVTHQGLSSPVTKSFNRGECK

SEQ ID NO: 79 - DNA, 376 bp, Artificial Sequence
  Synthetic Construct
  misc_feature (1)..(2): n is a, c, g, t or u
  misc_feature (8)..(9): n is a, c, g, t or u
nngtgcannctggtggagtctgggggagacttggtccagcctggggggtccctaaaactctcctgtgcaacctctggtttttccttcaccggctctgccatccactgggtccgccagtcttccgggaaaggcctggaatggcttggccgagttcaaagttattctcacagtttcgcgacagcttattctgcgtcgctggaaggcaggttcaccatctccagagatgagtcagagaacacggcgtatctccaaatgaatagcctgaaaccggaggacacggccgtctattattgtacaagacctttctcaggttacgatttgatgagtgatttttttcccaactggggccagggaaccctggtcaccgtctcctcag

SEQ ID NO: 80 - DNA, 337 bp, Artificial Sequence
  Synthetic Construct
  misc_feature (8)..(9): n is a, c, g, t or u
ggatgttnngtgactcagtctccaatatccctgcccgtcacccctggagagccggcctccatctcttgcaggtctagtcagagcctcatacatagtaatggatacaattacttggattggtacctgcagaagccagggcagtctccacagctcctgatctctttgggctctaagcgggcctccggggtccctgagaggttcagtggcagtggatcaggcacagattttacactgaaaatcagcagagtggaggctgaggatgttgggatttattactgcatgcaagctctacaaactccgtggacgttcggccaagggaccaaggtggaaatcaaac

SEQ ID NO: 81 - protein, 8 aa, Artificial Sequence
  Synthetic Construct
GFTFEDYT

SEQ ID NO: 82 - protein, 8 aa, Artificial Sequence
  Synthetic Construct
ISWKGGAI

SEQ ID NO: 83 - protein, 11 aa, Artificial Sequence
  Synthetic Construct
VKDNGFRSFDS

SEQ ID NO: 84 - protein, 11 aa, Artificial Sequence
  Synthetic Construct
QSLIHSNGYNY

SEQ ID NO: 85 - protein, 3 aa, Artificial Sequence
  Synthetic Construct
LGS

SEQ ID NO: 86 - protein, 9 aa, Artificial Sequence
  Synthetic Construct
MQALQTPWT

SEQ ID NO: 87 - protein, 118 aa, Artificial Sequence
  Synthetic Construct
  misc_feature (1)..(1): Xaa can be any naturally occurring amino acid
  misc_feature (3)..(4): Xaa can be any naturally occurring amino acid
XVXXVESGGDLVQPGRSLRLSCVISGFTFEDYTMHWVRLVPGKGLEWVSGISWKGGAIGYADSVKGRFTISRDNGKNSLHLQMNSLRPEDTALYHCVKDNGFRSFDSWGRGTLVAVSS

SEQ ID NO: 88 - protein, 112 aa, Artificial Sequence
  Synthetic Construct
  misc_feature (3)..(3): Xaa can be any naturally occurring amino acid
GCXVTQSPISLPVTPGEPASISCRSSQSLIHSNGYNYLDWYLQKPGQSPQLLISLGSKRASGVPERFSGSGSGTDFTLKISRVEAEDVGIYYCMQALQTPWTFGQGTKVEIK

SEQ ID NO: 89 - protein, 25 aa, Artificial Sequence
  Synthetic Construct
  misc_feature (1)..(1): Xaa can be any naturally occurring amino acid
  misc_feature (3)..(4): Xaa can be any naturally occurring amino acid
XVXXVESGGDLVQPGRSLRLSCVIS

SEQ ID NO: 90 - protein, 17 aa, Artificial Sequence
  Synthetic Construct
MHWVRLVPGKGLEWVSG

SEQ ID NO: 91 - protein, 38 aa, Artificial Sequence
  Synthetic Construct
GYADSVKGRFTISRDNGKNSLHLQMNSLRPEDTALYHC

SEQ ID NO: 92 - protein, 11 aa, Artificial Sequence
  Synthetic Construct
WGRGTLVAVSS

SEQ ID NO: 93 - protein, 26 aa, Artificial Sequence
  Synthetic Construct
  misc_feature (3)..(3): Xaa can be any naturally occurring amino acid
GCXVTQSPISLPVTPGEPASISCRSS

SEQ ID NO: 94 - protein, 17 aa, Artificial Sequence
  Synthetic Construct
LDWYLQKPGQSPQLLIS

SEQ ID NO: 95 - protein, 36 aa, Artificial Sequence
  Synthetic Construct
KRASGVPERFSGSGSGTDFTLKISRVEAEDVGIYYC

SEQ ID NO: 96 - protein, 10 aa, Artificial Sequence
  Synthetic Construct
FGQGTKVEIK

SEQ ID NO: 97 - protein, 445 aa, Artificial Sequence
  Synthetic Construct
  misc_feature (1)..(1): Xaa can be any naturally occurring amino acid
  misc_feature (3)..(4): Xaa can be any naturally occurring amino acid
  misc_feature (142)..(142): Xaa can be any naturally occurring amino acid
  misc_feature (212)..(212): Xaa can be any naturally occurring amino acid
  misc_feature (356)..(356): Xaa can be any naturally occurring amino acid
XVXXVESGGDLVQPGRSLRLSCVISGFTFEDYTMHWVRLVPGKGLEWVSGISWKGGAIGYADSVKGRFTISRDNGKNSLHLQMNSLRPEDTALYHCVKDNGFRSFDSWGRGTLVAVSSKGPSVFPLAPSSKSTSGGTAALGXLVKDYFPEPVTVSWNSGALTSGVHTFPAVLQSSGLYSLSSVVTVPSSSLGTQTYICNVNHKPSNTKVDKXVEPKSCDKTHTCPPCPAPELLGGPSVFLFPPKPKDTLMISRTPEVTCVVVDVSHEDPEVKFNWYVDGVEVHNAKTKPREEQYNSTYRVVSVLTVLHQDWLNGKEYKCKVSNKALPAPIEKTISKAKGQPREPQVYTLPPSRDEXTKNQVSLTCLVKGFYPSDIAVEWESNGQPENNYKTTPPVLDSDGSFFLYSKLTVDKSRWQQGNVFSCSVMHEALHNHYTQKSLSLSPGK

SEQ ID NO: 98 - protein, 215 aa, Artificial Sequence
  Synthetic Construct
  misc_feature (3)..(4): Xaa can be any naturally occurring amino acid
RCXXTQSPLSLPVTPGEPASISCRSSQSLLHSNGYNYLDWYLQKPGQSPQLLIYFGSNRASGVPDRFSGSGSGTDFTLNITRVEAEDVGVYYCMQALQSWTFGQGTKVEIKAPSVFIFPPSDEQLKSGTASVVCLLNNFYPREAKVQWKVDNALQSGNSQESVTEQDSKDSTYSLSSTLTLSKADYEKHKVYACEVTHQGLSSPVTKSFNRGECK

SEQ ID NO: 99 - DNA, 355 bp, Artificial Sequence
  Synthetic Construct
  misc_feature (1)..(3): n is a, c, g, t or u
  misc_feature (8)..(11): n is a, c, g, t or u
nnngtgcnnnnggtggagtctgggggagatctggtacagcctggcaggtccctgagactctcttgtgtaatctctggattcacttttgaagattacaccatgcactgggtccggctagttccagggaagggcctggagtgggtctcaggtataagttggaaaggtggtgccataggctatgcggactctgtgaagggccggttcaccatctccagagacaacggcaagaactccctgcatctgcaaatgaacagtctgagacctgaggacacggccttatatcactgtgtgaaagataatggttttcggtcctttgattcctggggccggggaaccctggtcgccgtctcctcag

SEQ ID NO: 100 - DNA, 334 bp, Artificial Sequence
  Synthetic Construct
  misc_feature (8)..(9): n is a, c, g, t or u
  misc_feature (11)..(11): n is a, c, g, t or u
cgatgttnngngactcagtctccactctccctgcccgtcacccctggagagccggcctccatctcctgcaggtctagtcagagcctcctgcatagtaatggatacaactatttggattggtacctgcagaagccagggcagtctccacaactcctgatctatttcggttctaatcgggcctccggggtccctgacaggttcagtggcagtggatcaggcacagattttacactgaacatcaccagagtggaggctgaggatgttggggtttattactgcatgcaagctctacaaagttggacgttcggccaagggaccaaggtggaaatcaaac

SEQ ID NO: 101 - protein, 8 aa, Artificial Sequence
  Synthetic Construct
GFTFRDYG

SEQ ID NO: 102 - protein, 8 aa, Artificial Sequence
  Synthetic Construct
IRYDERNK

SEQ ID NO: 103 - protein, 11 aa, Artificial Sequence
  Synthetic Construct
VKDSGLRYFNL

SEQ ID NO: 104 - protein, 11 aa, Artificial Sequence
  Synthetic Construct
QSLLHSNGYNY

SEQ ID NO: 105 - protein, 3 aa, Artificial Sequence
  Synthetic Construct
FGS

SEQ ID NO: 106 - protein, 8 aa, Artificial Sequence
  Synthetic Construct
MQALQSWT

SEQ ID NO: 107 - protein, 118 aa, Artificial Sequence
  Synthetic Construct
  misc_feature (1)..(1): Xaa can be any naturally occurring amino acid
XVQLVESGGGVVQPGGSLRLSCAASGFTFRDYGMHWVRQAPGKGLEWVAFIRYDERNKYYVDSVKGRFTVSRDNSKSTLYLQMNSLRAEDTAVYYCVKDSGLRYFNLWGRGTLVTVSS

SEQ ID NO: 108 - protein, 111 aa, Artificial Sequence
  Synthetic Construct
  misc_feature (3)..(4): Xaa can be any naturally occurring amino acid
RCXXTQSPLSLPVTPGEPASISCRSSQSLLHSNGYNYLDWYLQKPGQSPQLLIYFGSNRASGVPDRFSGSGSGTDFTLNITRVEAEDVGVYYCMQALQSWTFGQGTKVEIK

SEQ ID NO: 109 - protein, 25 aa, Artificial Sequence
  Synthetic Construct
  misc_feature (1)..(1): Xaa can be any naturally occurring amino acid
XVQLVESGGGVVQPGGSLRLSCAAS

SEQ ID NO: 110 - protein, 17 aa, Artificial Sequence
  Synthetic Construct
MHWVRQAPGKGLEWVAF

SEQ ID NO: 111 - protein, 38 aa, Artificial Sequence
  Synthetic Construct
YYVDSVKGRFTVSRDNSKSTLYLQMNSLRAEDTAVYYC

SEQ ID NO: 112 - protein, 11 aa, Artificial Sequence
  Synthetic Construct
WGRGTLVTVSS

SEQ ID NO: 113 - protein, 26 aa, Artificial Sequence
  Synthetic Construct
  misc_feature (3)..(4): Xaa can be any naturally occurring amino acid
RCXXTQSPLSLPVTPGEPASISCRSS

SEQ ID NO: 114 - protein, 17 aa, Artificial Sequence
  Synthetic Construct
LDWYLQKPGQSPQLLIY

SEQ ID NO: 115 - protein, 36 aa, Artificial Sequence
  Synthetic Construct
NRASGVPDRFSGSGSGTDFTLNITRVEAEDVGVYYC

SEQ ID NO: 116 - protein, 10 aa, Artificial Sequence
  Synthetic Construct
FGQGTKVEIK

SEQ ID NO: 117 - protein, 445 aa, Artificial Sequence
  Synthetic Construct
  misc_feature (1)..(1): Xaa can be any naturally occurring amino acid
  misc_feature (142)..(142): Xaa can be any naturally occurring amino acid
  misc_feature (212)..(212): Xaa can be any naturally occurring amino acid
  misc_feature (356)..(356): Xaa can be any naturally occurring amino acid
XVQLVESGGGVVQPGGSLRLSCAASGFTFRDYGMHWVRQAPGKGLEWVAFIRYDERNKYYVDSVKGRFTVSRDNSKSTLYLQMNSLRAEDTAVYYCVKDSGLRYFNLWGRGTLVTVSSKGPSVFPLAPSSKSTSGGTAALGXLVKDYFPEPVTVSWNSGALTSGVHTFPAVLQSSGLYSLSSVVTVPSSSLGTQTYICNVNHKPSNTKVDKXVEPKSCDKTHTCPPCPAPELLGGPSVFLFPPKPKDTLMISRTPEVTCVVVDVSHEDPEVKFNWYVDGVEVHNAKTKPREEQYNSTYRVVSVLTVLHQDWLNGKEYKCKVSNKALPAPIEKTISKAKGQPREPQVYTLPPSRDEXTKNQVSLTCLVKGFYPSDIAVEWESNGQPENNYKTTPPVLDSDGSFFLYSKLTVDKSRWQQGNVFSCSVMHEALHNHYTQKSLSLSPGK

SEQ ID NO: 118 - protein, 216 aa, Artificial Sequence
  Synthetic Construct
  misc_feature (3)..(3): Xaa can be any naturally occurring amino acid
DVXMTQSPLSLPVTPGEPASISCRSSQSLLHSNGYNYLDWYLQKPGQSPQLLIYFGSNRASGVPDRFSGSGSGTDFTLKISRVEAEDVGVYYCMQAQQTPWTFGQGTKVEIKAPSVFIFPPSDEQLKSGTASVVCLLNNFYPREAKVQWKVDNALQSGNSQESVTEQDSKDSTYSLSSTLTLSKADYEKHKVYACEVTHQGLSSPVTKSFNRGECK

SEQ ID NO: 119 - DNA, 355 bp, Artificial Sequence
  Synthetic Construct
  misc_feature (1)..(3): n is a, c, g, t or u
nnngtgcagctggtggagtctgggggaggcgtggtccagcctggggggtccctgagactctcctgtgcagcgtctggattcaccttcagagactatggcatgcactgggtccgccaggctccaggcaaggggctggagtgggtggcatttatacgatatgatgagagaaataaatattatgtagactccgtgaagggccgattcaccgtctccagagacaactccaagagcacactgtatctccaaatgaacagcctcagagctgaggacacggctgtatattactgtgtgaaagattccgggttgaggtacttcaatctctggggccgtggcaccctggtcaccgtctcctcag

SEQ ID NO: 120 - DNA, 337 bp, Artificial Sequence
  Synthetic Construct
  misc_feature (8)..(8): n is a, c, g, t or u
gatgttgngatgactcagtctccactctccctgcccgtcacccctggagagccggcctccatctcctgcaggtctagtcagagcctcctccatagtaatggatacaactatttggattggtacctgcagaagccagggcagtctccacagctcctgatctatttcggttctaatcgggcctccggggtccctgacaggttcagtggcagtggatcaggcacagattttacactgaaaatcagcagagtggaggctgaggatgttggggtttattactgcatgcaagctcaacaaactccgtggacgttcggccaagggaccaaggtggaaatcaaac

SEQ ID NO: 121 - protein, 8 aa, Artificial Sequence
  Synthetic Construct
GFTFSDYA

SEQ ID NO: 122 - protein, 8 aa, Artificial Sequence
  Synthetic Construct
IRFDGTKI

SEQ ID NO: 123 - protein, 11 aa, Artificial Sequence
  Synthetic Construct
AKDSGFRSFEV

SEQ ID NO: 124 - protein, 11 aa, Artificial Sequence
  Synthetic Construct
QSLLHSNGYNY

SEQ ID NO: 125 - protein, 3 aa, Artificial Sequence
  Synthetic Construct
FGS

SEQ ID NO: 126 - protein, 9 aa, Artificial Sequence
  Synthetic Construct
MQAQQTPWT

SEQ ID NO: 127 - protein, 118 aa, Artificial Sequence
  Synthetic Construct
  misc_feature (1)..(1): Xaa can be any naturally occurring amino acid
XCTLVQSGGGVVPPGGSLRLSCAASGFTFSDYAMHWVRQAPGKGLEWVTFIRFDGTKIDYKDSVKGRFTISRDDSKNTLYLEMNTLSTEDTAVYFCAKDSGFRSFEVWGRGTLVTVSS

SEQ ID NO: 128 - protein, 112 aa, Artificial Sequence
  Synthetic Construct
  misc_feature (3)..(3): Xaa can be any naturally occurring amino acid
DVXMTQSPLSLPVTPGEPASISCRSSQSLLHSNGYNYLDWYLQKPGQSPQLLIYFGSNRASGVPDRFSGSGSGTDFTLKISRVEAEDVGVYYCMQAQQTPWTFGQGTKVEIK

SEQ ID NO: 129 - protein, 25 aa, Artificial Sequence
  Synthetic Construct
  misc_feature (1)..(1): Xaa can be any naturally occurring amino acid
XCTLVQSGGGVVPPGGSLRLSCAAS

SEQ ID NO: 130 - protein, 17 aa, Artificial Sequence
  Synthetic Construct
MHWVRQAPGKGLEWVTF

SEQ ID NO: 131 - protein, 38 aa, Artificial Sequence
  Synthetic Construct
DYKDSVKGRFTISRDDSKNTLYLEMNTLSTEDTAVYFC

SEQ ID NO: 132 - protein, 11 aa, Artificial Sequence
  Synthetic Construct
WGRGTLVTVSS

SEQ ID NO: 133 - protein, 26 aa, Artificial Sequence
  Synthetic Construct
  misc_feature (3)..(3): Xaa can be any naturally occurring amino acid
DVXMTQSPLSLPVTPGEPASISCRSS

SEQ ID NO: 134 - protein, 17 aa, Artificial Sequence
  Synthetic Construct
LDWYLQKPGQSPQLLIY

SEQ ID NO: 135 - protein, 36 aa, Artificial Sequence; identical to SEQ ID NO: 15
  Synthetic Construct

SEQ ID NO: 136 - protein, 10 aa, Artificial Sequence
  Synthetic Construct
FGQGTKVEIK

SEQ ID NO: 137 - protein, 445 aa, Artificial Sequence
  Synthetic Construct
  misc_feature (1)..(1): Xaa can be any naturally occurring amino acid
  misc_feature (142)..(142): Xaa can be any naturally occurring amino acid
  misc_feature (212)..(212): Xaa can be any naturally occurring amino acid
  misc_feature (356)..(356): Xaa can be any naturally occurring amino acid
XCTLVQSGGGVVPPGGSLRLSCAASGFTFSDYAMHWVRQAPGKGLEWVTFIRFDGTKIDYKDSVKGRFTISRDDSKNTLYLEMNTLSTEDTAVYFCAKDSGFRSFEVWGRGTLVTVSSKGPSVFPLAPSSKSTSGGTAALGXLVKDYFPEPVTVSWNSGALTSGVHTFPAVLQSSGLYSLSSVVTVPSSSLGTQTYICNVNHKPSNTKVDKXVEPKSCDKTHTCPPCPAPELLGGPSVFLFPPKPKDTLMISRTPEVTCVVVDVSHEDPEVKFNWYVDGVEVHNAKTKPREEQYNSTYRVVSVLTVLHQDWLNGKEYKCKVSNKALPAPIEKTISKAKGQPREPQVYTLPPSRDEXTKNQVSLTCLVKGFYPSDIAVEWESNGQPENNYKTTPPVLDSDGSFFLYSKLTVDKSRWQQGNVFSCSVMHEALHNHYTQKSLSLSPGK

SEQ ID NO: 138 - protein, 215 aa, Artificial Sequence
  Synthetic Construct
  misc_feature (3)..(4): Xaa can be any naturally occurring amino acid
DIXXTQSPLSLPVTPGEPASISCRSSQSLLHSNGYNYLDWYLQKPGQSPQLLISLGSNRASGVPDRFSGSGSGTDFTLKISRVEAEDVGVYYCMQALQTWTFGQGTKVEIKAPSVFIFPPSDEQLKSGTASVVCLLNNFYPREAKVQWKVDNALQSGNSQESVTEQDSKDSTYSLSSTLTLSKADYEKHKVYACEVTHQGLSSPVTKSFNRGECK

SEQ ID NO: 139 - DNA, 355 bp, Artificial Sequence
  Synthetic Construct
  misc_feature (1)..(1): n is a, c, g, t or u
nggtgcacgctggtgcagtctgggggaggcgtagtcccgcccggggggtccctgagactctcctgtgcagcgtctggattcaccttcagtgactatgccatgcactgggtccgccaggctccaggcaaggggctggagtgggtgacatttatacgatttgatggaactaaaatagactataaagactccgtgaagggccgcttcaccatctccagagacgattccaagaacaccctttatctggagatgaacaccctgagtactgaagacacggctgtgtatttctgtgcgaaagattcaggttttcggtccttcgaggtctggggccgtggcaccctggtcactgtctcctcag

SEQ ID NO: 140 - DNA, 334 bp, Artificial Sequence
  Synthetic Construct
  misc_feature (8)..(9): n is a, c, g, t or u
  misc_feature (11)..(11): n is a, c, g, t or u
gatattgnngngactcagtctccactctccctgcccgtcacccctggagagccggcctccatctcctgcaggtctagccagagcctcctgcatagtaatggatacaactatttggattggtacctgcagaagccagggcagtctccacagctcctgatctctttgggttctaatcgggcctccggggtccctgacaggttcagtggcagtggatcaggcacagattttacactgaaaatcagcagagtggaggctgaggatgttggggtttattactgcatgcaagctctacaaacttggacgttcggccaagggaccaaggtggaaatcaaac

SEQ ID NO: 141 - protein, 8 aa, Artificial Sequence
  Synthetic Construct
GFTFDDYT

SEQ ID NO: 142 - protein, 8 aa, Artificial Sequence
  Synthetic Construct
IKWNSRAI

SEQ ID NO: 143 - protein, 11 aa, Artificial Sequence
  Synthetic Construct
VKDTGLRSFHS

SEQ ID NO: 144 - protein, 11 aa, Artificial Sequence
  Synthetic Construct
QSLLHSNGYNY

SEQ ID NO: 145 - protein, 3 aa, Artificial Sequence
  Synthetic Construct
LGS

SEQ ID NO: 146 - protein, 8 aa, Artificial Sequence
  Synthetic Construct
MQALQTWT

SEQ ID NO: 147 - protein, 118 aa, Artificial Sequence
  Synthetic Construct
  misc_feature (3)..(4): Xaa can be any naturally occurring amino acid
QVXXVESGGGLVQPGGSLRLSCAASGFTFDDYTMHWVRQPPGKGLEWVSSIKWNSRAIDYADSVKGRFTISRDNAKNSLFLQMNTLRTEDTAFYYCVKDTGLRSFHSWGQGTLLTVSS

SEQ ID NO: 148 - protein, 111 aa, Artificial Sequence
  Synthetic Construct
  misc_feature (3)..(4): Xaa can be any naturally occurring amino acid
DIXXTQSPLSLPVTPGEPASISCRSSQSLLHSNGYNYLDWYLQKPGQSPQLLISLGSNRASGVPDRFSGSGSGTDFTLKISRVEAEDVGVYYCMQALQTWTFGQGTKVEIK

SEQ ID NO: 149 - protein, 25 aa, Artificial Sequence
  Synthetic Construct
  misc_feature (3)..(4): Xaa can be any naturally occurring amino acid
QVXXVESGGGLVQPGGSLRLSCAAS

SEQ ID NO: 150 - protein, 17 aa, Artificial Sequence
  Synthetic Construct
MHWVRQPPGKGLEWVSS

SEQ ID NO: 151 - protein, 38 aa, Artificial Sequence
  Synthetic Construct
DYADSVKGRFTISRDNAKNSLFLQMNTLRTEDTAFYYC

SEQ ID NO: 152 - protein, 11 aa, Artificial Sequence
  Synthetic Construct
WGQGTLLTVSS

SEQ ID NO: 153 - protein, 26 aa, Artificial Sequence
  Synthetic Construct
  misc_feature (3)..(4): Xaa can be any naturally occurring amino acid
DIXXTQSPLSLPVTPGEPASISCRSS

SEQ ID NO: 154 - protein, 17 aa, Artificial Sequence
  Synthetic Construct
LDWYLQKPGQSPQLLIS

SEQ ID NO: 155 - protein, 36 aa, Artificial Sequence; identical to SEQ ID NO: 15
  Synthetic Construct

SEQ ID NO: 156 - protein, 10 aa, Artificial Sequence
  Synthetic Construct
FGQGTKVEIK

SEQ ID NO: 157 - protein, 445 aa, Artificial Sequence
  Synthetic Construct
  misc_feature (3)..(4): Xaa can be any naturally occurring amino acid
  misc_feature (142)..(142): Xaa can be any naturally occurring amino acid
  misc_feature (212)..(212): Xaa can be any naturally occurring amino acid
  misc_feature (356)..(356): Xaa can be any naturally occurring amino acid
QVXXVESGGGLVQPGGSLRLSCAASGFTFDDYTMHWVRQPPGKGLEWVSSIKWNSRAIDYADSVKGRFTISRDNAKNSLFLQMNTLRTEDTAFYYCVKDTGLRSFHSWGQGTLLTVSSKGPSVFPLAPSSKSTSGGTAALGXLVKDYFPEPVTVSWNSGALTSGVHTFPAVLQSSGLYSLSSVVTVPSSSLGTQTYICNVNHKPSNTKVDKXVEPKSCDKTHTCPPCPAPELLGGPSVFLFPPKPKDTLMISRTPEVTCVVVDVSHEDPEVKFNWYVDGVEVHNAKTKPREEQYNSTYRVVSVLTVLHQDWLNGKEYKCKVSNKALPAPIEKTISKAKGQPREPQVYTLPPSRDEXTKNQVSLTCLVKGFYPSDIAVEWESNGQPENNYKTTPPVLDSDGSFFLYSKLTVDKSRWQQGNVFSCSVMHEALHNHYTQKSLSLSPGK

SEQ ID NO: 158 - protein, 212 aa, Artificial Sequence
  Synthetic Construct
  misc_feature (3)..(3): Xaa can be any naturally occurring amino acid
RNXETQSPGTLSLSPGERATLSCTASQRVNSDSVAWYQQRPGLAPRLLIYDASHRATGIPDRFSGGRGGTGFTLTIRALEPEDFAVYYCQQYGESPLTFGQGTKVEIKAPSVFIFPPSDEQLKSGTASVVCLLNNFYPREAKVQWKVDNALQSGNSQESVTEQDSKDSTYSLSSTLTLSKADYEKHKVYACEVTHQGLSSPVTKSFNRGECK

SEQ ID NO: 159 - DNA, 355 bp, Artificial Sequence
  Synthetic Construct
  misc_feature (7)..(7): n is a, c, g, t or u
  misc_feature (9)..(10): n is a, c, g, t or u
caggtgncnncggtggagtcggggggaggcttggtacagcctggcgggtccctgagactctcctgtgcagcctctggattcacctttgatgattacaccatgcattgggtccggcaacctccagggaagggcctggagtgggtctcaagtatcaagtggaacagtcgtgccatagactatgcggactctgtgaagggccgattcaccatctccagagacaacgccaagaactccctgtttctgcaaatgaatactctgagaactgaggacacggccttctattactgtgtgaaggatacgggactacggtcctttcactcctggggccagggaaccctgctcaccgtctcctcag

SEQ ID NO: 160 - DNA, 325 bp, Artificial Sequence
  Synthetic Construct
  misc_feature (8)..(9): n is a, c, g, t or u
cgaaatanngagacgcagtctccaggcaccctgtctttgtctccaggcgagagggccaccctctcctgcacggccagtcagagagtgaatagcgactccgtagcctggtatcagcagagacctggcctggcgcccaggctcctcatctatgatgcatcccacagggccactggcatcccagacaggttcagtggcggtaggggtgggacaggcttcactctcaccatcagggcactggagcctgaagattttgcagtatattactgtcaacagtatggtgagtcacctctaacgttcggccaagggaccaaggtggaaatcaaac

SEQ ID NO: 161 - protein, 8 aa, Artificial Sequence
  Synthetic Construct
GFSFTGSA

SEQ ID NO: 162 - protein, 10 aa, Artificial Sequence
  Synthetic Construct
VQSYSHSFAT

SEQ ID NO: 163 - protein, 16 aa, Artificial Sequence
  Synthetic Construct
TRPFSGYDLMSDFFPN

SEQ ID NO: 164 - protein, 7 aa, Artificial Sequence
  Synthetic Construct
QRVNSDS

SEQ ID NO: 165 - protein, 3 aa, Artificial Sequence
  Synthetic Construct
DAS

SEQ ID NO: 166 - protein, 9 aa, Artificial Sequence
  Synthetic Construct
QQYGESPLT

SEQ ID NO: 167 - protein, 125 aa, Artificial Sequence
  Synthetic Construct
  misc_feature (1)..(1): Xaa can be any naturally occurring amino acid
  misc_feature (3)..(4): Xaa can be any naturally occurring amino acid
XVXXVESGGDLVQPGGSLKLSCATSGFSFTGSAIHWVRQSSGKGLEWLGRVQSYSHSFATAYSASLEGRFTISRDESENTAYLQMNSLKPEDTAVYYCTRPFSGYDLMSDFFPNWGQGTLVTVSS

SEQ ID NO: 168 - protein, 108 aa, Artificial Sequence
  Synthetic Construct
  misc_feature (3)..(3): Xaa can be any naturally occurring amino acid
RNXETQSPGTLSLSPGERATLSCTASQRVNSDSVAWYQQRPGLAPRLLIYDASHRATGIPDRFSGGRGGTGFTLTIRALEPEDFAVYYCQQYGESPLTFGQGTKVEIK

SEQ ID NO: 169 - protein, 25 aa, Artificial Sequence
  Synthetic Construct
  misc_feature (1)..(1): Xaa can be any naturally occurring amino acid
  misc_feature (3)..(4): Xaa can be any naturally occurring amino acid
XVXXVESGGDLVQPGGSLKLSCATS

SEQ ID NO: 170 - protein, 17 aa, Artificial Sequence
  Synthetic Construct
IHWVRQSSGKGLEWLGR

SEQ ID NO: 171 - protein, 38 aa, Artificial Sequence; identical to SEQ ID NO: 71
  Synthetic Construct

SEQ ID NO: 172 - protein, 11 aa, Artificial Sequence
  Synthetic Construct
WGQGTLVTVSS

SEQ ID NO: 173 - protein, 26 aa, Artificial Sequence
  Synthetic Construct
  misc_feature (3)..(3): Xaa can be any naturally occurring amino acid
RNXETQSPGTLSLSPGERATLSCTAS

SEQ ID NO: 174 - protein, 17 aa, Artificial Sequence
  Synthetic Construct
VAWYQQRPGLAPRLLIY

SEQ ID NO: 175 - protein, 36 aa, Artificial Sequence; identical to SEQ ID NO: 75
  Synthetic Construct

SEQ ID NO: 176 - protein, 10 aa, Artificial Sequence
  Synthetic Construct
FGQGTKVEIK

SEQ ID NO: 177 - protein, 452 aa, Artificial Sequence
  Synthetic Construct
  misc_feature (1)..(1): Xaa can be any naturally occurring amino acid
  misc_feature (3)..(4): Xaa can be any naturally occurring amino acid
  misc_feature (149)..(149): Xaa can be any naturally occurring amino acid
  misc_feature (219)..(219): Xaa can be any naturally occurring amino acid
  misc_feature (363)..(363): Xaa can be any naturally occurring amino acid
XVXXVESGGDLVQPGGSLKLSCATSGFSFTGSAIHWVRQSSGKGLEWLGRVQSYSHSFATAYSASLEGRFTISRDESENTAYLQMNSLKPEDTAVYYCTRPFSGYDLMSDFFPNWGQGTLVTVSSKGPSVFPLAPSSKSTSGGTAALGXLVKDYFPEPVTVSWNSGALTSGVHTFPAVLQSSGLYSLSSVVTVPSSSLGTQTYICNVNHKPSNTKVDKXVEPKSCDKTHTCPPCPAPELLGGPSVFLFPPKPKDTLMISRTPEVTCVVVDVSHEDPEVKFNWYVDGVEVHNAKTKPREEQYNSTYRVVSVLTVLHQDWLNGKEYKCKVSNKALPAPIEKTISKAKGQPREPQVYTLPPSRDEXTKNQVSLTCLVKGFYPSDIAVEWESNGQPENNYKTTPPVLDSDGSFFLYSKLTVDKSRWQQGNVFSCSVMHEALHNHYTQKSLSLSPGK

SEQ ID NO: 178 - protein, 215 aa, Artificial Sequence
  Synthetic Construct
  misc_feature (3)..(4): Xaa can be any naturally occurring amino acid
DIXXTQSPLSLPVTPGEPASISCRSSQSLLHSNGIHYLDWYLQKPGQSPQLLIYLGSKRASGVPDRFSGSGSGTDFTLKISRVEAEDVGVYYCMQSLQTFTFGPGTKVDIKAPSVFIFPPSDEQLKSGTASVVCLLNNFYPREAKVQWKVDNALQSGNSQESVTEQDSKDSTYSLSSTLTLSKADYEKHKVYACEVTHQGLSSPVTKSFNRGECK

SEQ ID NO: 179 - DNA, 376 bp, Artificial Sequence
  Synthetic Construct
  misc_feature (1)..(3): n is a, c, g, t or u
  misc_feature (8)..(12): n is a, c, g, t or u
nnngtgcnnnnngtggagtctgggggagacttggtccagcctggggggtccctaaaactctcctgtgcaacctctggtttttccttcaccggctctgccatccactgggtccgccagtcttccgggaaaggcctggaatggcttggccgagttcaaagttattctcacagtttcgcgacagcttattctgcgtcgctggaaggcaggttcaccatctccagagatgagtcagagaacacggcgtatctccaaatgaatagcctgaaaccggaggacacggccgtctattattgtacaagacctttctcaggttacgatttgatgagtgatttttttcccaactggggccagggaaccctggtcaccgtctcctcag

SEQ ID NO: 180 - DNA, 334 bp, Artificial Sequence
  Synthetic Construct
  misc_feature (8)..(9): n is a, c, g, t or u
  misc_feature (11)..(11): n is a, c, g, t or u
gatattgnngngactcagtctccactctccctgcccgtcacccctggagagccggcctccatctcctgcaggtcaagtcagagcctcctgcacagtaatggaatccactatttggattggtatctgcagaagccagggcagtctccacagctcctgatctatttgggttctaaacgggcctccggggtccctgacaggttcagtggcagtggatcaggcacagattttacacttaaaatcagcagagtggaggctgaggatgttggggtttattactgcatgcaatctctacaaaccttcactttcggccctgggaccaaagtggatatcaaac

SEQ ID NO: 181 - protein, 8 aa, Artificial Sequence
  Synthetic Construct
GFTFDDYT

SEQ ID NO: 182 - protein, 8 aa, Artificial Sequence
  Synthetic Construct
IRYDGTRA

SEQ ID NO: 183 - protein, 11 aa, Artificial Sequence
  Synthetic Construct
VKDGGLRYFDY

SEQ ID NO: 184 - protein, 11 aa, Artificial Sequence
  Synthetic Construct
QSLLHSNGIHY

SEQ ID NO: 185 - protein, 3 aa, Artificial Sequence
  Synthetic Construct
LGS

SEQ ID NO: 186 - protein, 8 aa, Artificial Sequence
  Synthetic Construct
MQSLQTFT

SEQ ID NO: 187 - protein, 118 aa, Artificial Sequence
  Synthetic Construct
  misc_feature (1)..(1): Xaa can be any naturally occurring amino acid
XCRLVESGGDVVQPGGSLRLSCEASGFTFDDYTMHWVRQVPGKSLEWLSLIRYDGTRAEYADSVKGRFTISRDNSKNSLFLQMNSLKTDDSAFYYCVKDGGLRYFDYWGQGTLVTVSS

SEQ ID NO: 188 - protein, 111 aa, Artificial Sequence
  Synthetic Construct
  misc_feature (3)..(4): Xaa can be any naturally occurring amino acid
DIXXTQSPLSLPVTPGEPASISCRSSQSLLHSNGIHYLDWYLQKPGQSPQLLIYLGSKRASGVPDRFSGSGSGTDFTLKISRVEAEDVGVYYCMQSLQTFTFGPGTKVDIK

SEQ ID NO: 189 - protein, 25 aa, Artificial Sequence
  Synthetic Construct
  misc_feature (1)..(1): Xaa can be any naturally occurring amino acid
XCRLVESGGDVVQPGGSLRLSCEAS

SEQ ID NO: 190 - protein, 17 aa, Artificial Sequence
  Synthetic Construct
MHWVRQVPGKSLEWLSL

SEQ ID NO: 191 - protein, 38 aa, Artificial Sequence
  Synthetic Construct
EYADSVKGRFTISRDNSKNSLFLQMNSLKTDDSAFYYC

SEQ ID NO: 192 - protein, 11 aa, Artificial Sequence
  Synthetic Construct
WGQGTLVTVSS

SEQ ID NO: 193 - protein, 26 aa, Artificial Sequence
  Synthetic Construct
  misc_feature (3)..(4): Xaa can be any naturally occurring amino acid
DIXXTQSPLSLPVTPGEPASISCRSS

SEQ ID NO: 194 - protein, 17 aa, Artificial Sequence
  Synthetic Construct
LDWYLQKPGQSPQLLIY

SEQ ID NO: 195 - protein, 36 aa, Artificial Sequence
  Synthetic Construct
KRASGVPDRFSGSGSGTDFTLKISRVEAEDVGVYYC

SEQ ID NO: 196 - protein, 10 aa, Artificial Sequence
  Synthetic Construct
FGPGTKVDIK

SEQ ID NO: 197 - protein, 445 aa, Artificial Sequence
  Synthetic Construct
  misc_feature (1)..(1): Xaa can be any naturally occurring amino acid
  misc_feature (142)..(142): Xaa can be any naturally occurring amino acid
  misc_feature (212)..(212): Xaa can be any naturally occurring amino acid
  misc_feature (356)..(356): Xaa can be any naturally occurring amino acid
XCRLVESGGDVVQPGGSLRLSCEASGFTFDDYTMHWVRQVPGKSLEWLSLIRYDGTRAEYADSVKGRFTISRDNSKNSLFLQMNSLKTDDSAFYYCVKDGGLRYFDYWGQGTLVTVSSKGPSVFPLAPSSKSTSGGTAALGXLVKDYFPEPVTVSWNSGALTSGVHTFPAVLQSSGLYSLSSVVTVPSSSLGTQTYICNVNHKPSNTKVDKXVEPKSCDKTHTCPPCPAPELLGGPSVFLFPPKPKDTLMISRTPEVTCVVVDVSHEDPEVKFNWYVDGVEVHNAKTKPREEQYNSTYRVVSVLTVLHQDWLNGKEYKCKVSNKALPAPIEKTISKAKGQPREPQVYTLPPSRDEXTKNQVSLTCLVKGFYPSDIAVEWESNGQPENNYKTTPPVLDSDGSFFLYSKLTVDKSRWQQGNVFSCSVMHEALHNHYTQKSLSLSPGK

SEQ ID NO: 198 - protein, 215 aa, Artificial Sequence
  Synthetic Construct
  misc_feature (4)..(4): Xaa can be any naturally occurring amino acid
  misc_feature (30)..(30): Xaa can be any naturally occurring amino acid
DVGXTQSPVSLPVTPGEPASISCRSSQSLXHSNGYNYLDWYLQKPGQSPQLLIYMGSIRASGVPDRFSGSGSGTDFTLKISRVEAEDVGVYYCMQSLQTWTFGQGTKVEIKAPSVFIFPPSDEQLKSGTASVVCLLNNFYPREAKVQWKVDNALQSGNSQESVTEQDSKDSTYSLSSTLTLSKADYEKHKVYACEVTHQGLSSPVTKSFNRGECK

SEQ ID NO: 199 - DNA, 355 bp, Artificial Sequence
  Synthetic Construct
  misc_feature (1)..(2): n is a, c, g, t or u
nngtgcaggctggtggagtctgggggagacgtggtgcagcctggggggtccctaagactctcctgtgaagcctctggattcacctttgatgattatactatgcactgggtccgtcaagttccggggaagagtctggagtggctctctcttattcgttacgacgggactagggcagaatatgcagactccgtgaagggtcgattcaccatctccagagacaacagcaaaaactccctttttctgcaaatgaacagtctgaaaactgacgactccgccttctattattgtgtaaaagatggtggattacgatactttgactactggggccagggcactctggtcaccgtctcctcag

SEQ ID NO: 200 - DNA, 334 bp, Artificial Sequence
  Synthetic Construct
  misc_feature (9)..(9): n is a, c, g, t or u
  misc_feature (11)..(11): n is a, c, g, t or u
  misc_feature (88)..(88): n is a, c, g, t or u
gatgttggngngactcagtctccagtctccctgcccgtcacccctggagagccggcctccatctcctgcaggtctagtcagagcctcntacatagtaatggatacaactatttggattggtacctgcagaagccagggcagtctccacagctcctgatctatatgggttcaattcgggcctccggggtccctgacaggttcagtggcagtggatcaggcacagattttacactgaaaatcagcagagtggaggctgaggatgttggggtttattactgcatgcaaagtctacaaacgtggacgttcggccaagggaccaaggtggaaatcaaac

SEQ ID NO: 201 - protein, 8 aa, Artificial Sequence
  Synthetic Construct
GFIFGDYT

SEQ ID NO: 202 - protein, 8 aa, Artificial Sequence
  Synthetic Construct
ISWNSGSM

SEQ ID NO: 203 - protein, 11 aa, Artificial Sequence
  Synthetic Construct
VKDNGYRAFDF

SEQ ID NO: 204 - protein, 11 aa, Artificial Sequence
  Synthetic Construct
  misc_feature (4)..(4): Xaa can be any naturally occurring amino acid
QSLXHSNGYNY

SEQ ID NO: 205 - protein, 3 aa, Artificial Sequence
  Synthetic Construct
MGS

SEQ ID NO: 206 - protein, 8 aa, Artificial Sequence
  Synthetic Construct
MQSLQTWT

SEQ ID NO: 207 - protein, 118 aa, Artificial Sequence
  Synthetic Construct
  misc_feature (1)..(1): Xaa can be any naturally occurring amino acid
  misc_feature (3)..(4): Xaa can be any naturally occurring amino acid
XVXXVESGGGLVQPGRSLRLSCAASGFIFGDYTMHWVRQTPGKGLEWVSRISWNSGSMEYADSVKGRLTISRDNAKNSLHLQMNSLRVEDTALYYCVKDNGYRAFDFWGQGTMVTVSS

SEQ ID NO: 208 - protein, 111 aa, Artificial Sequence
  Synthetic Construct
  misc_feature (4)..(4): Xaa can be any naturally occurring amino acid
  misc_feature (30)..(30): Xaa can be any naturally occurring amino acid
DVGXTQSPVSLPVTPGEPASISCRSSQSLXHSNGYNYLDWYLQKPGQSPQLLIYMGSIRASGVPDRFSGSGSGTDFTLKISRVEAEDVGVYYCMQSLQTWTFGQGTKVEIK

SEQ ID NO: 209 - protein, 25 aa, Artificial Sequence
  Synthetic Construct
  misc_feature (1)..(1): Xaa can be any naturally occurring amino acid
  misc_feature (3)..(4): Xaa can be any naturally occurring amino acid
XVXXVESGGGLVQPGRSLRLSCAAS

SEQ ID NO: 210 - protein, 17 aa, Artificial Sequence
  Synthetic Construct
MHWVRQTPGKGLEWVSR

SEQ ID NO: 211 - protein, 38 aa, Artificial Sequence
  Synthetic Construct
EYADSVKGRLTISRDNAKNSLHLQMNSLRVEDTALYYC

SEQ ID NO: 212 - protein, 11 aa, Artificial Sequence
  Synthetic Construct
WGQGTMVTVSS

SEQ ID NO: 213 - protein, 26 aa, Artificial Sequence
  Synthetic Construct
  misc_feature (4)..(4): Xaa can be any naturally occurring amino acid
DVGXTQSPVSLPVTPGEPASISCRSS

SEQ ID NO: 214 - protein, 17 aa, Artificial Sequence
  Synthetic Construct
LDWYLQKPGQSPQLLIY

SEQ ID NO: 215 - protein, 36 aa, Artificial Sequence
  Synthetic Construct
IRASGVPDRFSGSGSGTDFTLKISRVEAEDVGVYYC

SEQ ID NO: 216 - protein, 10 aa, Artificial Sequence
  Synthetic Construct
FGQGTKVEIK

SEQ ID NO: 217 - protein, 445 aa, Artificial Sequence
  Synthetic Construct
  misc_feature (1)..(1): Xaa can be any naturally occurring amino acid
  misc_feature (3)..(4): Xaa can be any naturally occurring amino acid
  misc_feature (142)..(142): Xaa can be any naturally occurring amino acid
  misc_feature (212)..(212): Xaa can be any naturally occurring amino acid
  misc_feature (356)..(356): Xaa can be any naturally occurring amino acid
XVXXVESGGGLVQPGRSLRLSCAASGFIFGDYTMHWVRQTPGKGLEWVSRISWNSGSMEYADSVKGRLTISRDNAKNSLHLQMNSLRVEDTALYYCVKDNGYRAFDFWGQGTMVTVSSKGPSVFPLAPSSKSTSGGTAALGXLVKDYFPEPVTVSWNSGALTSGVHTFPAVLQSSGLYSLSSVVTVPSSSLGTQTYICNVNHKPSNTKVDKXVEPKSCDKTHTCPPCPAPELLGGPSVFLFPPKPKDTLMISRTPEVTCVVVDVSHEDPEVKFNWYVDGVEVHNAKTKPREEQYNSTYRVVSVLTVLHQDWLNGKEYKCKVSNKALPAPIEKTISKAKGQPREPQVYTLPPSRDEXTKNQVSLTCLVKGFYPSDIAVEWESNGQPENNYKTTPPVLDSDGSFFLYSKLTVDKSRWQQGNVFSCSVMHEALHNHYTQKSLSLSPGK

SEQ ID NO: 218 - protein, 215 aa, Artificial Sequence
  Synthetic Construct
  misc_feature (3)..(4): Xaa can be any naturally occurring amino acid
RCXXTQSPLSLPVTPGEPASISCRSSQSLLHSNGYNYLDWYLQKPGQSPQLLIYLGSNRASGVPDRFSGSGSGTDFTLKISRVEAEDVGVYYCMQALQRWTFGQGTKVEIKAPSVFIFPPSDEQLKSGTASVVCLLNNFYPREAKVQWKVDNALQSGNSQESVTEQDSKDSTYSLSSTLTLSKADYEKHKVYACEVTHQGLSSPVTKSFNRGECK

SEQ ID NO: 219 - DNA, 355 bp, Artificial Sequence
  Synthetic Construct
  misc_feature (1)..(1): n is a, c, g, t or u
  misc_feature (9)..(9): n is a, c, g, t or u
  misc_feature (11)..(11): n is a, c, g, t or u
naggtgcangnggtggagtctgggggaggcttggtacagcctggcaggtccctgagactctcctgtgcagcctctggattcatttttggcgattataccatgcactgggtccggcaaactccagggaagggcctggagtgggtctctagaattagttggaatagtggaagtatggaatatgcggactctgtgaagggccgactcaccatctccagagacaacgccaagaactccctccatcttcaaatgaacagtctgagagttgaggacacggccttatattactgtgtaaaagataatggttatcgtgcttttgatttttggggccaagggacaatggtcaccgtctcttcag

SEQ ID NO: 220 - DNA, 334 bp, Artificial Sequence
  Synthetic Construct
  misc_feature (9)..(9): n is a, c, g, t or u
  misc_feature (11)..(11): n is a, c, g, t or u
cgatgttgngngactcagtctccactctccctgcccgtcacccctggagagccggcctccatctcctgcaggtctagtcagagcctcctgcatagtaatggatacaactatttggattggtacctgcagaagccagggcagtctccacagctcctgatctatttgggttctaatcgggcctccggggtccctgacaggttcagtggcagtggatcaggcacagattttacactgaaaatcagcagagtggaggctgaggatgttggggtttattactgcatgcaagctctacaaaggtggacgttcggccaagggaccaaggtggaaatcaaac

SEQ ID NO: 221 - protein, 8 aa, Artificial Sequence
  Synthetic Construct
GFDISGSA

SEQ ID NO: 222 - protein, 10 aa, Artificial Sequence
  Synthetic Construct
IRSRSHAFAT

SEQ ID NO: 223 - protein, 16 aa, Artificial Sequence
  Synthetic Construct
TRPFRGYDLSSDFYPN

SEQ ID NO: 224 - protein, 7 aa, Artificial Sequence
  Synthetic Construct
QTITSGS

SEQ ID NO: 225 - protein, 3 aa, Artificial Sequence
  Synthetic Construct
DAS

SEQ ID NO: 226 - protein, 9 aa, Artificial Sequence
  Synthetic Construct
QQYGETPQT

SEQ ID NO: 227 - protein, 125 aa, Artificial Sequence
  Synthetic Construct
  misc_feature (3)..(3): Xaa can be any naturally occurring amino acid
GAXLVQSGGGLVQPGGSLKVSCAVSGFDISGSAIHWVRQTSGKGLEWLGRIRSRSHAFATAYAPSVRGRFTISTDESKNTAFLMMNSLNSDDTAVYYCTRPFRGYDLSSDFYPNWGQGTLVTVSS

SEQ ID NO: 228 - protein, 108 aa, Artificial Sequence
  Synthetic Construct
EIGETQSPGTLSLSPGEGATLSCRASQTITSGSLAWYQQRPGLAPRLLIYDASTRATGIPKRFSGSGSGTDFTLTISRLEPEDFAVYYCQQYGETPQTFGQGTKVEIK

SEQ ID NO: 229 - protein, 25 aa, Artificial Sequence
  Synthetic Construct
  misc_feature (3)..(3): Xaa can be any naturally occurring amino acid
GAXLVQSGGGLVQPGGSLKVSCAVS

SEQ ID NO: 230 - protein, 17 aa, Artificial Sequence
  Synthetic Construct
IHWVRQTSGKGLEWLGR

SEQ ID NO: 231 - protein, 38 aa, Artificial Sequence
  Synthetic Construct
AYAPSVRGRFTISTDESKNTAFLMMNSLNSDDTAVYYC

SEQ ID NO: 232 - protein, 11 aa, Artificial Sequence
  Synthetic Construct
WGQGTLVTVSS

SEQ ID NO: 233 - protein, 26 aa, Artificial Sequence
  Synthetic Construct
EIGETQSPGTLSLSPGEGATLSCRAS

SEQ ID NO: 234 - protein, 17 aa, Artificial Sequence
  Synthetic Construct
LAWYQQRPGLAPRLLIY

SEQ ID NO: 235 - protein, 36 aa, Artificial Sequence
  Synthetic Construct
TRATGIPKRFSGSGSGTDFTLTISRLEPEDFAVYYC

SEQ ID NO: 236 - protein, 10 aa, Artificial Sequence
  Synthetic Construct
FGQGTKVEIK

SEQ ID NO: 237 - protein, 452 aa, Artificial Sequence
  Synthetic Construct
  misc_feature (3)..(3): Xaa can be any naturally occurring amino acid
  misc_feature (149)..(149): Xaa can be any naturally occurring amino acid
  misc_feature (219)..(219): Xaa can be any naturally occurring amino acid
  misc_feature (363)..(363): Xaa can be any naturally occurring amino acid
GAXLVQSGGGLVQPGGSLKVSCAVSGFDISGSAIHWVRQTSGKGLEWLGRIRSRSHAFATAYAPSVRGRFTISTDESKNTAFLMMNSLNSDDTAVYYCTRPFRGYDLSSDFYPNWGQGTLVTVSSKGPSVFPLAPSSKSTSGGTAALGXLVKDYFPEPVTVSWNSGALTSGVHTFPAVLQSSGLYSLSSVVTVPSSSLGTQTYICNVNHKPSNTKVDKXVEPKSCDKTHTCPPCPAPELLGGPSVFLFPPKPKDTLMISRTPEVTCVVVDVSHEDPEVKFNWYVDGVEVHNAKTKPREEQYNSTYRVVSVLTVLHQDWLNGKEYKCKVSNKALPAPIEKTISKAKGQPREPQVYTLPPSRDEXTKNQVSLTCLVKGFYPSDIAVEWESNGQPENNYKTTPPVLDSDGSFFLYSKLTVDKSRWQQGNVFSCSVMHEALHNHYTQKSLSLSPGK

SEQ ID NO: 238 - protein, 216 aa, Artificial Sequence
  Synthetic Construct
DVVMTQSPLSLPVTPGEPASISCRSSQSLLHSNGYNYLDWYLQKPGQSPQLLIYFGSKRASGVPDRFSGSGSGTDFTLRISRVEAEDIGVYYCMQAQQTPWTFGQGTKVEIKAPSVFIFPPSDEQLKSGTASVVCLLNNFYPREAKVQWKVDNALQSGNSQESVTEQDSKDSTYSLSSTLTLSKADYEKHKVYACEVTHQGLSSPVTKSFNRGECK

SEQ ID NO: 239 - DNA, 376 bp, Artificial Sequence
  Synthetic Construct
  misc_feature (7)..(9): n is a, c, g, t or u
ggtgccnnnctggtgcagtctggcggaggactggtccagcctgggggatccctgaaagtctcctgtgcagtctctgggttcgacatcagcggctctgccatacactgggtccgccagacctccgggaaagggctggagtggcttggccgaattagaagcagatctcacgcttttgcgacggcctatgctccgtcggtgagaggcaggttcaccatttccacagatgagtcaaagaacacggcattcttgatgatgaacagcctgaatagcgacgacacggccgtttactactgtactcgaccatttcgaggttatgatttgtcgagtgacttttatcccaactggggccagggaaccctggtcaccgtctcctcag

SEQ ID NO: 240 - DNA, 337 bp, Artificial Sequence
  Synthetic Construct
gatgttgtgatgactcagtctccactctccctgcccgtcacccctggagagccggcctccatctcctgcaggtctagtcagagcctcttgcatagtaatggatacaactatttggattggtacctgcagaagccagggcagtctccacaactcctgatctatttcggttctaaacgggcctccggggtccctgacaggttcagtggcagtggctcaggcacagattttacactgagaatcagcagagtggaggctgaggatattggggtttattactgcatgcaagctcaacagactccgtggacgttcggccaagggaccaaggtggaaatcaaac

SEQ ID NO: 241 - protein, 8 aa, Artificial Sequence
  Synthetic Construct
GFTFSDYS

SEQ ID NO: 242 - protein, 8 aa, Artificial Sequence
  Synthetic Construct
IRYDGSNK

SEQ ID NO: 243 - protein, 11 aa, Artificial Sequence
  Synthetic Construct
VKDSGLRAFEI

SEQ ID NO: 244 - protein, 11 aa, Artificial Sequence
  Synthetic Construct
QSLLHSNGYNY

SEQ ID NO: 245 - protein, 3 aa, Artificial Sequence
  Synthetic Construct
LGS

SEQ ID NO: 246 - protein, 8 aa, Artificial Sequence
  Synthetic Construct
MQALQRWT

SEQ ID NO: 247 - protein, 118 aa, Artificial Sequence
  Synthetic Construct
  misc_feature (3)..(3): Xaa can be any naturally occurring amino acid
QVXLVESGGGVVQPGGSLRLSCAASGFTFSDYSIHWVRQAPGKGLEWVAFIRYDGSNKDYADSVKGRITISRDNSKNTLYLQMNSLRAEDTAVYYCVKDSGLRAFEIWGPGTMVTVSS

SEQ ID NO: 248 - protein, 111 aa, Artificial Sequence
  Synthetic Construct
  misc_feature (3)..(4): Xaa can be any naturally occurring amino acid
RCXXTQSPLSLPVTPGEPASISCRSSQSLLHSNGYNYLDWYLQKPGQSPQLLIYLGSNRASGVPDRFSGSGSGTDFTLKISRVEAEDVGVYYCMQALQRWTFGQGTKVEIK

SEQ ID NO: 249 - protein, 25 aa, Artificial Sequence
  Synthetic Construct
  misc_feature (3)..(3): Xaa can be any naturally occurring amino acid
QVXLVESGGGVVQPGGSLRLSCAAS

SEQ ID NO: 250 - protein, 17 aa, Artificial Sequence
  Synthetic Construct
IHWVRQAPGKGLEWVAF

SEQ ID NO: 251 - protein, 38 aa, Artificial Sequence
  Synthetic Construct
DYADSVKGRITISRDNSKNTLYLQMNSLRAEDTAVYYC

SEQ ID NO: 252 - protein, 11 aa, Artificial Sequence
  Synthetic Construct
WGPGTMVTVSS

SEQ ID NO: 253 - protein, 26 aa, Artificial Sequence
  Synthetic Construct
  misc_feature (3)..(4): Xaa can be any naturally occurring amino acid
RCXXTQSPLSLPVTPGEPASISCRSS

SEQ ID NO: 254 - protein, 17 aa, Artificial Sequence
  Synthetic Construct
LDWYLQKPGQSPQLLIY

SEQ ID NO: 255 - protein, 36 aa, Artificial Sequence; identical to SEQ ID NO: 15
  Synthetic Construct

SEQ ID NO: 256 - protein, 10 aa, Artificial Sequence
  Synthetic Construct
FGQGTKVEIK

SEQ ID NO: 257 - protein, 445 aa, Artificial Sequence
  Synthetic Construct
  misc_feature (3)..(3): Xaa can be any naturally occurring amino acid
  misc_feature (142)..(142): Xaa can be any naturally occurring amino acid
  misc_feature (212)..(212): Xaa can be any naturally occurring amino acid
  misc_feature (356)..(356): Xaa can be any naturally occurring amino acid
QVXLVESGGGVVQPGGSLRLSCAASGFTFSDYSIHWVRQAPGKGLEWVAFIRYDGSNKDYADSVKGRITISRDNSKNTLYLQMNSLRAEDTAVYYCVKDSGLRAFEIWGPGTMVTVSSKGPSVFPLAPSSKSTSGGTAALGXLVKDYFPEPVTVSWNSGALTSGVHTFPAVLQSSGLYSLSSVVTVPSSSLGTQTYICNVNHKPSNTKVDKXVEPKSCDKTHTCPPCPAPELLGGPSVFLFPPKPKDTLMISRTPEVTCVVVDVSHEDPEVKFNWYVDGVEVHNAKTKPREEQYNSTYRVVSVLTVLHQDWLNGKEYKCKVSNKALPAPIEKTISKAKGQPREPQVYTLPPSRDEXTKNQVSLTCLVKGFYPSDIAVEWESNGQPENNYKTTPPVLDSDGSFFLYSKLTVDKSRWQQGNVFSCSVMHEALHNHYTQKSLSLSPGK

SEQ ID NO: 258 - protein, 212 aa, Artificial Sequence
  Synthetic Construct
EIGETQSPGTLSLSPGEGATLSCRASQTITSGSLAWYQQRPGLAPRLLIYDASTRATGIPKRFSGSGSGTDFTLTISRLEPEDFAVYYCQQYGETPQTFGQGTKVEIKAPSVFIFPPSDEQLKSGTASVVCLLNNFYPREAKVQWKVDNALQSGNSQESVTEQDSKDSTYSLSSTLTLSKADYEKHKVYACEVTHQGLSSPVTKSFNRGECK

SEQ ID NO: 259 - DNA, 355 bp, Artificial Sequence
  Synthetic Construct
  misc_feature (9)..(9): n is a, c, g, t or u
caggtgcanctggtggagtctgggggaggcgtggtccagcctggggggtccctgagactctcctgtgcagcgtctggattcaccttcagtgactatagcattcactgggtccgccaggctccaggcaaggggctggaatgggtggcatttataaggtatgatggaagtaataaagactatgcagactccgtgaagggccgaataaccatctccagagacaattccaagaacaccctgtatctgcaaatgaacagtctgagagctgaggacacggctgtgtattactgtgtgaaagattccggactacgtgcttttgagatctggggcccagggacaatggtcaccgtctcttcag

SEQ ID NO: 260 - DNA, 325 bp, Artificial Sequence
  Synthetic Construct
  misc_feature (9)..(9): n is a, c, g, t or u
gaaataggngagacgcagtctccaggcaccctgtctttgtctccaggggaaggcgccaccctctcctgtagggccagtcagactattaccagcggctctttagcctggtatcagcagagacctggcctggcgcccaggctcctcatctatgatgcgtccaccagggccactggcatcccaaagaggttcagtggcagtgggtctgggacagacttcactctcacaattagcagactggagcctgaagattttgcagtatattactgtcagcaatatggtgaaacacctcaaacgttcggccaagggaccaaggtggagatcaaac

SEQ ID NO: 261 - protein, 8 aa, Artificial Sequence
  Synthetic Construct
GFTFDDYT

SEQ ID NO: 262 - protein, 8 aa, Artificial Sequence
  Synthetic Construct
ISWKSGSL

SEQ ID NO: 263 - protein, 11 aa, Artificial Sequence
  Synthetic Construct
VKDSGLRSFDV

SEQ ID NO: 264 - protein, 11 aa, Artificial Sequence
  Synthetic Construct
QSLLHSNGYNY

SEQ ID NO: 265 - protein, 3 aa, Artificial Sequence
  Synthetic Construct
FGS

SEQ ID NO: 266 - protein, 9 aa, Artificial Sequence
  Synthetic Construct
MQAQQTPWT

SEQ ID NO: 267 - protein, 118 aa, Artificial Sequence
  Synthetic Construct
  misc_feature (1)..(1): Xaa can be any naturally occurring amino acid
XVQLVESGGGLVQPGRSLRISCEASGFTFDDYTMHWVRQTPGKGLEWVSGISWKSGSLGYADSVKGRFTISRDNAKNSLYLEVHSLRPEDSAFYYCVKDSGLRSFDVWGRGTLLTVSS

SEQ ID NO: 268 - protein, 112 aa, Artificial Sequence
  Synthetic Construct
DVVMTQSPLSLPVTPGEPASISCRSSQSLLHSNGYNYLDWYLQKPGQSPQLLIYFGSKRASGVPDRFSGSGSGTDFTLRISRVEAEDIGVYYCMQAQQTPWTFGQGTKVEIK

SEQ ID NO: 269 - protein, 25 aa, Artificial Sequence
  Synthetic Construct
  misc_feature (1)..(1): Xaa can be any naturally occurring amino acid
XVQLVESGGGLVQPGRSLRISCEAS

SEQ ID NO: 270 - protein, 17 aa, Artificial Sequence
  Synthetic Construct
MHWVRQTPGKGLEWVSG

SEQ ID NO: 271 - protein, 38 aa, Artificial Sequence
  Synthetic Construct
GYADSVKGRFTISRDNAKNSLYLEVHSLRPEDSAFYYC

SEQ ID NO: 272 - protein, 11 aa, Artificial Sequence
  Synthetic Construct
WGRGTLLTVSS

SEQ ID NO: 273 - protein, 26 aa, Artificial Sequence
  Synthetic Construct
DVVMTQSPLSLPVTPGEPASISCRSS

SEQ ID NO: 274 - protein, 17 aa, Artificial Sequence
  Synthetic Construct
LDWYLQKPGQSPQLLIY

SEQ ID NO: 275 - protein, 36 aa, Artificial Sequence
  Synthetic Construct
KRASGVPDRFSGSGSGTDFTLRISRVEAEDIGVYYC

SEQ ID NO: 276 - protein, 10 aa, Artificial Sequence
  Synthetic Construct
FGQGTKVEIK

SEQ ID NO: 277 - protein, 445 aa, Artificial Sequence
  Synthetic Construct
  misc_feature (1)..(1): Xaa can be any naturally occurring amino acid
  misc_feature (142)..(142): Xaa can be any naturally occurring amino acid
  misc_feature (212)..(212): Xaa can be any naturally occurring amino acid
  misc_feature (356)..(356): Xaa can be any naturally occurring amino acid
XVQLVESGGGLVQPGRSLRISCEASGFTFDDYTMHWVRQTPGKGLEWVSGISWKSGSLGYADSVKGRFTISRDNAKNSLYLEVHSLRPEDSAFYYCVKDSGLRSFDVWGRGTLLTVSSKGPSVFPLAPSSKSTSGGTAALGXLVKDYFPEPVTVSWNSGALTSGVHTFPAVLQSSGLYSLSSVVTVPSSSLGTQTYICNVNHKPSNTKVDKXVEPKSCDKTHTCPPCPAPELLGGPSVFLFPPKPKDTLMISRTPEVTCVVVDVSHEDPEVKFNWYVDGVEVHNAKTKPREEQYNSTYRVVSVLTVLHQDWLNGKEYKCKVSNKALPAPIEKTISKAKGQPREPQVYTLPPSRDEXTKNQVSLTCLVKGFYPSDIAVEWESNGQPENNYKTTPPVLDSDGSFFLYSKLTVDKSRWQQGNVFSCSVMHEALHNHYTQKSLSLSPGK

SEQ ID NO: 278 - protein, 211 aa, Artificial Sequence
  Synthetic Construct
  misc_feature (3)..(3): Xaa can be any naturally occurring amino acid
DIXETQSPSTLSASVGDRVTITCRASQSISSWLAWYQQKPGKAPKLLIYRASRLESGVPSRFSGSGSGTEFTLTISSLQPDDFATYYCQQYDTYLITFGQGTRLEIKAPSVFIFPPSDEQLKSGTASVVCLLNNFYPREAKVQWKVDNALQSGNSQESVTEQDSKDSTYSLSSTLTLSKADYEKHKVYACEVTHQGLSSPVTKSFNRGECK

SEQ ID NO: 279 - DNA, 355 bp, Artificial Sequence
  Synthetic Construct
  misc_feature (1)..(3): n is a, c, g, t or u
nnngtgcagctggtggagtctgggggaggcttggtacagcctggcaggtccctgagaatctcctgtgaagcctctggattcacctttgatgattataccatgcactgggtccggcaaactccagggaagggcctggagtgggtctctggcattagttggaaaagtggtagcctaggctatgcggactctgtgaagggccggttcaccatctccagagacaacgccaagaactccctctatttggaagtgcacagtctgagacctgaggactcggccttctattactgtgtaaaagatagtggactacggagcttcgatgtctggggccggggcaccctgctcactgtctcctcag

SEQ ID NO: 280 - DNA, 322 bp, Artificial Sequence
  Synthetic Construct
  misc_feature (7)..(9): n is a, c, g, t or u
gacatcnnngagacccagtctccttccaccctgtctgcatctgtaggggacagagtcaccatcacttgccgggccagtcagagtattagtagctggttggcctggtatcagcagaaaccagggaaagcccctaaactcctgatctatcgggcgtctcgtttagaaagtggggtcccatcaaggttcagcggcagtggatctgggacagaattcactctcaccatcagcagcctgcagcctgatgattttgcaacttattactgccaacaatatgatacttacctgatcaccttcggccaagggacacgactggagattaaac

SEQ ID NO: 281 - protein, 8 aa, Artificial Sequence
  Synthetic Construct
GFTFSNYA

SEQ ID NO: 282 - protein, 8 aa, Artificial Sequence
  Synthetic Construct
MSGRGGRT

SEQ ID NO: 283 - protein, 19 aa, Artificial Sequence
  Synthetic Construct
AKDLPSDNSGLNSAEFFHV

SEQ ID NO: 284 - protein, 6 aa, Artificial Sequence
  Synthetic Construct
QSISSW

SEQ ID NO: 285 - protein, 3 aa, Artificial Sequence
  Synthetic Construct
RAS

SEQ ID NO: 286 - protein, 9 aa, Artificial Sequence
  Synthetic Construct
QQYDTYLIT

SEQ ID NO: 287 - protein, 126 aa, Artificial Sequence
  Synthetic Construct
EVQLVESGGGLVQPGGSVRLSCAASGFTFSNYAMSWVRQTPGKGLEWVSGMSGRGGRTDYADSVKGRFTISRDSSNSTLYLQMNSLRAEDTALYYCAKDLPSDNSGLNSAEFFHVWGQGALVTVSS

SEQ ID NO: 288 - protein, 107 aa, Artificial Sequence
  Synthetic Construct
  misc_feature (3)..(3): Xaa can be any naturally occurring amino acid
DIXETQSPSTLSASVGDRVTITCRASQSISSWLAWYQQKPGKAPKLLIYRASRLESGVPSRFSGSGSGTEFTLTISSLQPDDFATYYCQQYDTYLITFGQGTRLEIK

SEQ ID NO: 289 - protein, 25 aa, Artificial Sequence
  Synthetic Construct
EVQLVESGGGLVQPGGSVRLSCAAS

SEQ ID NO: 290 - protein, 17 aa, Artificial Sequence
  Synthetic Construct
MSWVRQTPGKGLEWVSG

SEQ ID NO: 291 - protein, 38 aa, Artificial Sequence
  Synthetic Construct
DYADSVKGRFTISRDSSNSTLYLQMNSLRAEDTALYYC

SEQ ID NO: 292 - protein, 11 aa, Artificial Sequence
  Synthetic Construct
WGQGALVTVSS

SEQ ID NO: 293 - protein, 26 aa, Artificial Sequence
  Synthetic Construct
  misc_feature (3)..(3): Xaa can be any naturally occurring amino acid
DIXETQSPSTLSASVGDRVTITCRAS

SEQ ID NO: 294 - protein, 17 aa, Artificial Sequence
  Synthetic Construct
LAWYQQKPGKAPKLLIY

SEQ ID NO: 295 - protein, 36 aa, Artificial Sequence
  Synthetic Construct
RLESGVPSRFSGSGSGTEFTLTISSLQPDDFATYYC

SEQ ID NO: 296 - protein, 10 aa, Artificial Sequence
  Synthetic Construct
FGQGTRLEIK

SEQ ID NO: 297 - protein, 453 aa, Artificial Sequence
  Synthetic Construct
  misc_feature (150)..(150): Xaa can be any naturally occurring amino acid
  misc_feature (220)..(220): Xaa can be any naturally occurring amino acid
  misc_feature (364)..(364): Xaa can be any naturally occurring amino acid
EVQLVESGGGLVQPGGSVRLSCAASGFTFSNYAMSWVRQTPGKGLEWVSGMSGRGGRTDYADSVKGRFTISRDSSNSTLYLQMNSLRAEDTALYYCAKDLPSDNSGLNSAEFFHVWGQGALVTVSSKGPSVFPLAPSSKSTSGGTAALGXLVKDYFPEPVTVSWNSGALTSGVHTFPAVLQSSGLYSLSSVVTVPSSSLGTQTYICNVNHKPSNTKVDKXVEPKSCDKTHTCPPCPAPELLGGPSVFLFPPKPKDTLMISRTPEVTCVVVDVSHEDPEVKFNWYVDGVEVHNAKTKPREEQYNSTYRVVSVLTVLHQDWLNGKEYKCKVSNKALPAPIEKTISKAKGQPREPQVYTLPPSRDEXTKNQVSLTCLVKGFYPSDIAVEWESNGQPENNYKTTPPVLDSDGSFFLYSKLTVDKSRWQQGNVFSCSVMHEALHNHYTQKSLSLSPGK

SEQ ID NO: 298 - protein, 211 aa, Artificial Sequence
  Synthetic Construct
DIRETQSPSTLSASVGDRVTITCRASESISSWLAWYQQKPGKAPKLLIYEASTLETGVPSRFSGSGSGTEFTLTIRSLQPDDFATYYCQHYNSDSLTFGGGTKVEIKAPSVFIFPPSDEQLKSGTASVVCLLNNFYPREAKVQWKVDNALQSGNSQESVTEQDSKDSTYSLSSTLTLSKADYEKHKVYACEVTHQGLSSPVTKSFNRGECK

SEQ ID NO: 299 - DNA, 379 bp, Artificial Sequence
  Synthetic Construct
gaggtgcagctggtggagtctgggggaggcttggtacagccgggggggtccgtgagactctcctgtgcagcctctggattcacctttagtaattatgccatgagctgggtccgccagactccggggaaggggctggagtgggtctcaggtatgagtggtaggggtggtaggactgactacgcagactccgtgaagggccggttcaccatctccagagacagttccaacagcaccctctatctacaaatgaacagcctgagagccgaggacacggccttatattactgtgcgaaagatttaccctctgataatagtggcctcaactccgctgaattcttccatgtctggggacagggcgccctggtcaccgtctcctcag

SEQ ID NO: 300 - DNA, 322 bp, Artificial Sequence
  Synthetic Construct
  misc_feature (9)..(9): n is a, c, g, t or u
gacatccgngagacccagtctccatccaccctgtctgcatctgtaggggacagagtcaccatcacttgccgggccagtgagagtattagtagctggttggcctggtatcagcagaaaccagggaaagcccctaaactcctgatctatgaggcgtctactttagaaactggggtcccatcaagattcagcggcagtggatctgggacagaattcactctcaccatcagaagcctgcagcctgatgattttgcaacttattactgccaacactataatagtgactctctcactttcggcggcgggaccaaggtggagatcaaac

SEQ ID NO: 301 - protein, 8 aa, Artificial Sequence
  Synthetic Construct
GDPFTSYY

SEQ ID NO: 302 - protein, 7 aa, Artificial Sequence
  Synthetic Construct
IFTTGST

SEQ ID NO: 303 - protein, 20 aa, Artificial Sequence
  Synthetic Construct
ARVRRYCSGGRCYPYFYMDV

SEQ ID NO: 304 - protein, 6 aa, Artificial Sequence
  Synthetic Construct
ESISSW

SEQ ID NO: 305 - protein, 3 aa, Artificial Sequence
  Synthetic Construct
EAS

SEQ ID NO: 306 - protein, 9 aa, Artificial Sequence
  Synthetic Construct
QHYNSDSLT

SEQ ID NO: 307 - protein, 126 aa, Artificial Sequence
  Synthetic Construct
QVQLQESGPGLVEPSETLSLTCTVSGDPFTSYYWTWIRQPAGKGLEWLGRIFTTGSTSYNPSLKSRVTMSVDTSKSQFSLKLTAVTAADTAVYYCARVRRYCSGGRCYPYFYMDVWGKGTTVIVSS

SEQ ID NO: 308 - protein, 107 aa, Artificial Sequence
  Synthetic Construct
DIRETQSPSTLSASVGDRVTITCRASESISSWLAWYQQKPGKAPKLLIYEASTLETGVPSRFSGSGSGTEFTLTIRSLQPDDFATYYCQHYNSDSLTFGGGTKVEIK

SEQ ID NO: 309 - protein, 25 aa, Artificial Sequence
  Synthetic Construct
QVQLQESGPGLVEPSETLSLTCTVS

SEQ ID NO: 310 - protein, 17 aa, Artificial Sequence
  Synthetic Construct
WTWIRQPAGKGLEWLGR

SEQ ID NO: 311 - protein, 38 aa, Artificial Sequence
  Synthetic Construct
SYNPSLKSRVTMSVDTSKSQFSLKLTAVTAADTAVYYC

SEQ ID NO: 312 - protein, 11 aa, Artificial Sequence
  Synthetic Construct
WGKGTTVIVSS

SEQ ID NO: 313 - protein, 26 aa, Artificial Sequence
  Synthetic Construct
DIRETQSPSTLSASVGDRVTITCRAS

SEQ ID NO: 314 - protein, 17 aa, Artificial Sequence
  Synthetic Construct
LAWYQQKPGKAPKLLIY

SEQ ID NO: 315 - protein, 36 aa, Artificial Sequence
  Synthetic Construct
TLETGVPSRFSGSGSGTEFTLTIRSLQPDDFATYYC

SEQ ID NO: 316 - protein, 10 aa, Artificial Sequence
  Synthetic Construct
FGGGTKVEIK

SEQ ID NO: 317 - protein, 453 aa, Artificial Sequence
  Synthetic Construct
  misc_feature (150)..(150): Xaa can be any naturally occurring amino acid
  misc_feature (220)..(220): Xaa can be any naturally occurring amino acid
  misc_feature (364)..(364): Xaa can be any naturally occurring amino acid
QVQLQESGPGLVEPSETLSLTCTVSGDPFTSYYWTWIRQPAGKGLEWLGRIFTTGSTSYNPSLKSRVTMSVDTSKSQFSLKLTAVTAADTAVYYCARVRRYCSGGRCYPYFYMDVWGKGTTVIVSSKGPSVFPLAPSSKSTSGGTAALGXLVKDYFPEPVTVSWNSGALTSGVHTFPAVLQSSGLYSLSSVVTVPSSSLGTQTYICNVNHKPSNTKVDKXVEPKSCDKTHTCPPCPAPELLGGPSVFLFPPKPKDTLMISRTPEVTCVVVDVSHEDPEVKFNWYVDGVEVHNAKTKPREEQYNSTYRVVSVLTVLHQDWLNGKEYKCKVSNKALPAPIEKTISKAKGQPREPQVYTLPPSRDEXTKNQVSLTCLVKGFYPSDIAVEWESNGQPENNYKTTPPVLDSDGSFFLYSKLTVDKSRWQQGNVFSCSVMHEALHNHYTQKSLSLSPGK

SEQ ID NO: 318 - protein, 215 aa, Artificial Sequence
  Synthetic Construct
  misc_feature (3)..(4): Xaa can be any naturally occurring amino acid
RCXXTQSPLYLPVTPGEPASISCRSSQSLLHSNGIHYLDWYLQKPGQSPQLLIYLGSKRASGVPDRFSGSGSGTDFTLKISRVEAEDVGVYYCMQSLQTFTFGPGTKVDIKAPSVFIFPPSDEQLKSGTASVVCLLNNFYPREAKVQWKVDNALQSGNSQESVTEQDSKDSTYSLSSTLTLSKADYEKHKVYACEVTHQGLSSPVTKSFNRGECK

SEQ ID NO: 319 - DNA, 378 bp, Artificial Sequence
  Synthetic Construct
caggtgcagctgcaggagtcgggcccaggcctggtggagccttcggagaccctgtccctcacctgcactgtctctggggaccccttcactagttactattggacatggatccggcagcccgccgggaagggactggagtggctagggcgtatctttaccactgggagcaccagctacaacccctccctcaagagtcgagtcaccatgtcagtggacacgtccaagagtcagttctccctgaaactgaccgctgtgaccgccgcggacacggccgtctattactgtgcgagagtcagaagatattgtagtggtggaaggtgctacccctacttctacatggacgtctggggcaaagggaccacggtcatcgtctcctca

SEQ ID NO: 320 - DNA, 334 bp, Artificial Sequence
  Synthetic Construct
  misc_feature (9)..(9): n is a, c, g, t or u
  misc_feature (11)..(11): n is a, c, g, t or u
cgatgttgngngactcagtctccactctacctgcccgtcacccctggagagccggcctccatctcctgcaggtctagtcagagcctcctgcatagtaatggaatccactatttggattggtacctgcagaagccagggcagtctccacagctcctgatctatttgggttctaagcgggcctccggggtccctgacaggttcagtggcagtggatcaggcacagattttacactgaaaatcagcagagtggaggctgaggatgttggagtttattactgcatgcaatctctacaaaccttcactttcggccctgggaccaaagtggatatcaaac

SEQ ID NO: 321 - protein, 8 aa, Artificial Sequence
  Synthetic Construct
GFTFDDYT

SEQ ID NO: 322 - protein, 8 aa, Artificial Sequence
  Synthetic Construct
IRWDGSRT

SEQ ID NO: 323 - protein, 11 aa, Artificial Sequence
  Synthetic Construct
VKDGGLRYFDS

SEQ ID NO: 324 - protein, 11 aa, Artificial Sequence
  Synthetic Construct
QSLLHSNGIHY

SEQ ID NO: 325 - protein, 3 aa, Artificial Sequence
  Synthetic Construct
LGS

SEQ ID NO: 326 - protein, 8 aa, Artificial Sequence
  Synthetic Construct
MQSLQTFT

SEQ ID NO: 327 - protein, 118 aa, Artificial Sequence
  Synthetic Construct
  misc_feature (3)..(3): Xaa can be any naturally occurring amino acid
RCXLVESGGLVVQPGGSLRLSCEASGFTFDDYTMHWVRQSPQKGLEWVSLIRWDGSRTEYADSVKGRFTISRDNSKNSLYLQMNTLRADDSAFYFCVKDGGLRYFDSWGQGTLVTVSS

SEQ ID NO: 328 - protein, 111 aa, Artificial Sequence
  Synthetic Construct
  misc_feature (3)..(4): Xaa can be any naturally occurring amino acid
RCXXTQSPLYLPVTPGEPASISCRSSQSLLHSNGIHYLDWYLQKPGQSPQLLIYLGSKRASGVPDRFSGSGSGTDFTLKISRVEAEDVGVYYCMQSLQTFTFGPGTKVDIK

SEQ ID NO: 329 - protein, 25 aa, Artificial Sequence
  Synthetic Construct
  misc_feature (3)..(3): Xaa can be any naturally occurring amino acid
RCXLVESGGLVVQPGGSLRLSCEAS

SEQ ID NO: 330 - protein, 17 aa, Artificial Sequence
  Synthetic Construct
MHWVRQSPQKGLEWVSL

SEQ ID NO: 331 - protein, 38 aa, Artificial Sequence
  Synthetic Construct
EYADSVKGRFTISRDNSKNSLYLQMNTLRADDSAFYFC

SEQ ID NO: 332 - protein, 11 aa, Artificial Sequence
  Synthetic Construct
WGQGTLVTVSS

SEQ ID NO: 333 - protein, 26 aa, Artificial Sequence
  Synthetic Construct
  misc_feature (3)..(4): Xaa can be any naturally occurring amino acid
RCXXTQSPLYLPVTPGEPASISCRSS

SEQ ID NO: 334 - protein, 17 aa, Artificial Sequence
  Synthetic Construct
LDWYLQKPGQSPQLLIY

SEQ ID NO: 335 - protein, 36 aa, Artificial Sequence; identical to SEQ ID NO: 195
  Synthetic Construct

SEQ ID NO: 336 - protein, 10 aa, Artificial Sequence
  Synthetic Construct
FGPGTKVDIK

SEQ ID NO: 337 - protein, 445 aa, Artificial Sequence
  Synthetic Construct
  misc_feature (3)..(3): Xaa can be any naturally occurring amino acid
  misc_feature (142)..(142): Xaa can be any naturally occurring amino acid
  misc_feature (212)..(212): Xaa can be any naturally occurring amino acid
  misc_feature (356)..(356): Xaa can be any naturally occurring amino acid
RCXLVESGGLVVQPGGSLRLSCEASGFTFDDYTMHWVRQSPQKGLEWVSLIRWDGSRTEYADSVKGRFTISRDNSKNSLYLQMNTLRADDSAFYFCVKDGGLRYFDSWGQGTLVTVSSKGPSVFPLAPSSKSTSGGTAALGXLVKDYFPEPVTVSWNSGALTSGVHTFPAVLQSSGLYSLSSVVTVPSSSLGTQTYICNVNHKPSNTKVDKXVEPKSCDKTHTCPPCPAPELLGGPSVFLFPPKPKDTLMISRTPEVTCVVVDVSHEDPEVKFNWYVDGVEVHNAKTKPREEQYNSTYRVVSVLTVLHQDWLNGKEYKCKVSNKALPAPIEKTISKAKGQPREPQVYTLPPSRDEXTKNQVSLTCLVKGFYPSDIAVEWESNGQPENNYKTTPPVLDSDGSFFLYSKLTVDKSRWQQGNVFSCSVMHEALHNHYTQKSLSLSPGK

SEQ ID NO: 338 - protein, 215 aa, Artificial Sequence
  Synthetic Construct
EIVMTQSPLSLPVTPGEPASISCRSSQSLLHSNGIHYLDWYLQKPGQSPQLLIYLGSKRASGVPDRFSGSGSGTDFTLKISRVEAEDVGVYYCMQSLQTFTFGPGTKVDIKAPSVFIFPPSDEQLKSGTASVVCLLNNFYPREAKVQWKVDNALQSGNSQESVTEQDSKDSTYSLSSTLTLSKADYEKHKVYACEVTHQGLSSPVTKSFNRGECK

SEQ ID NO: 339 - DNA, 355 bp, Artificial Sequence
  Synthetic Construct
  misc_feature (8)..(9): n is a, c, g, t or u
aggtgccnnctggtggagtctgggggactcgtggtacagcctggggggtccctgagactctcctgtgaagcctctggattcacctttgatgattacaccatgcactgggtccgtcaatctccgcagaagggtctggagtgggtctctcttattcgttgggatgggagtaggacagagtatgcagactctgtgaagggtcgattcaccatctccagagacaacagcaagaactccctgtatctgcaaatgaacactctcagagctgacgactccgccttctatttttgtgtaaaagatggtggcttacgctactttgactcctggggccagggaactctggtcaccgtctcctcag

SEQ ID NO: 340 - DNA, 334 bp, Artificial Sequence
  Synthetic Construct
gaaattgtgatgactcagtctccactctccctgcccgtcacccctggagagccggcctccatctcctgcaggtcaagtcagagcctcctgcacagtaatggaatccactatttggattggtacctgcagaagccagggcagtctccacagctcctgatctatttgggttctaaacgggcctccggggtccctgacaggttcagtggcagtggatcaggcacagattttacactgaaaatcagcagagtggaggctgaggatgttggggtttattactgcatgcaatctctacaaaccttcactttcggccctgggaccaaagtggatatcaaac

SEQ ID NO: 341 - protein, 8 aa, Artificial Sequence
  Synthetic Construct
GFTFDDYT

SEQ ID NO: 342 - protein, 8 aa, Artificial Sequence
  Synthetic Construct
IRWDGSRT

SEQ ID NO: 343 - protein, 11 aa, Artificial Sequence
  Synthetic Construct
VKDGGLRYFDS

SEQ ID NO: 344 - protein, 11 aa, Artificial Sequence
  Synthetic Construct
QSLLHSNGIHY

SEQ ID NO: 345 - protein, 3 aa, Artificial Sequence
  Synthetic Construct
LGS

SEQ ID NO: 346 - protein, 8 aa, Artificial Sequence
  Synthetic Construct
MQSLQTFT

SEQ ID NO: 347 - protein, 118 aa, Artificial Sequence
  Synthetic Construct
QVQLVESGGLVVQPGGSLRLSCEASGFTFDDYTMHWVRQSPQKGLEWVSLIRWDGSRTEYADSVKGRFTISRDNSKNSLYLQMNTLRADDSAFYFCVKDGGLRYFDSWGQGTLVTVSS

SEQ ID NO: 348 - protein, 111 aa, Artificial Sequence
  Synthetic Construct
EIVMTQSPLSLPVTPGEPASISCRSSQSLLHSNGIHYLDWYLQKPGQSPQLLIYLGSKRASGVPDRFSGSGSGTDFTLKISRVEAEDVGVYYCMQSLQTFTFGPGTKVDIK

SEQ ID NO: 349 - protein, 25 aa, Artificial Sequence
  Synthetic Construct
QVQLVESGGLVVQPGGSLRLSCEAS

SEQ ID NO: 350 - protein, 17 aa, Artificial Sequence
  Synthetic Construct
MHWVRQSPQKGLEWVSL

SEQ ID NO: 351 - protein, 38 aa, Artificial Sequence; identical to SEQ ID NO: 331
  Synthetic Construct

SEQ ID NO: 352 - protein, 11 aa, Artificial Sequence
  Synthetic Construct
WGQGTLVTVSS

SEQ ID NO: 353 - protein, 26 aa, Artificial Sequence
  Synthetic Construct
EIVMTQSPLSLPVTPGEPASISCRSS

SEQ ID NO: 354 - protein, 17 aa, Artificial Sequence
  Synthetic Construct
LDWYLQKPGQSPQLLIY

SEQ ID NO: 355 - protein, 36 aa, Artificial Sequence; identical to SEQ ID NO: 195
  Synthetic Construct

SEQ ID NO: 356 - protein, 10 aa, Artificial Sequence
  Synthetic Construct
FGPGTKVDIK

SEQ ID NO: 357 - protein, 445 aa, Artificial Sequence
  Synthetic Construct
  misc_feature (142)..(142): Xaa can be any naturally occurring amino acid
  misc_feature (212)..(212): Xaa can be any naturally occurring amino acid
  misc_feature (356)..(356): Xaa can be any naturally occurring amino acid
QVQLVESGGLVVQPGGSLRLSCEASGFTFDDYTMHWVRQSPQKGLEWVSLIRWDGSRTEYADSVKGRFTISRDNSKNSLYLQMNTLRADDSAFYFCVKDGGLRYFDSWGQGTLVTVSSKGPSVFPLAPSSKSTSGGTAALGXLVKDYFPEPVTVSWNSGALTSGVHTFPAVLQSSGLYSLSSVVTVPSSSLGTQTYICNVNHKPSNTKVDKXVEPKSCDKTHTCPPCPAPELLGGPSVFLFPPKPKDTLMISRTPEVTCVVVDVSHEDPEVKFNWYVDGVEVHNAKTKPREEQYNSTYRVVSVLTVLHQDWLNGKEYKCKVSNKALPAPIEKTISKAKGQPREPQVYTLPPSRDEXTKNQVSLTCLVKGFYPSDIAVEWESNGQPENNYKTTPPVLDSDGSFFLYSKLTVDKSRWQQGNVFSCSVMHEALHNHYTQKSLSLSPGK

SEQ ID NO: 358 - protein, 215 aa, Artificial Sequence
  Synthetic Construct
  misc_feature (3)..(4): Xaa can be any naturally occurring amino acid
RCXXTQSPLSLPVTPGEPASISCRSSQSLLHSNGYNYLDWYLQKPGQSPQLLIYLGSNRASGVPDRFSGSGSGTDFTLKISRVEAEDVGVYYCMQAQQSWTFGQGTKVEIKAPSVFIFPPSDEQLKSGTASVVCLLNNFYPREAKVQWKVDNALQSGNSQESVTEQDSKDSTYSLSSTLTLSKADYEKHKVYACEVTHQGLSSPVTKSFNRGECK

SEQ ID NO: 359 - DNA, 355 bp, Artificial Sequence
  Synthetic Construct
caggtgcagctggtggagtctgggggactcgtggtacagcctggggggtccctgagactctcctgtgaagcctctggattcacctttgatgattacaccatgcactgggtccgtcaatctccgcagaagggtctggagtgggtctctcttattcgttgggatgggagtaggacagagtatgcagactctgtgaagggtcgattcaccatctccagagacaacagcaagaactccctgtatctgcaaatgaacactctcagagctgacgactccgccttctatttttgtgtaaaagatggtggcttacgctactttgactcctggggccagggaactctggtcaccgtctcctcag

SEQ ID NO: 360 - DNA, 334 bp, Artificial Sequence
  Synthetic Construct
  misc_feature (9)..(9): n is a, c, g, t or u
  misc_feature (11)..(11): n is a, c, g, t or u
cgatgttgngngactcagtctccactctccctgcccgtcacccctggagagccggcctccatctcctgcaggtctagtcagagcctcctgcatagtaatggatacaactatttggattggtacctgcagaagccagggcagtctccacaactcctgatctatttgggttctaatcgggcctccggggtccctgacaggttcagtggcagtggatcaggcacagattttacactgaaaatcagcagagtggaggctgaggatgttggggtttattactgcatgcaagctcaacaaagttggacgttcggccaagggaccaaggtggaaatcaaac

SEQ ID NO: 361 - protein, 8 aa, Artificial Sequence
  Synthetic Construct
GFTFEDYT

SEQ ID NO: 362 - protein, 8 aa, Artificial Sequence
  Synthetic Construct
IHWNSEKR

SEQ ID NO: 363 - protein, 11 aa, Artificial Sequence
  Synthetic Construct
VKDSGLRSLQY

SEQ ID NO: 364 - protein, 11 aa, Artificial Sequence
  Synthetic Construct
QSLLHSNGYNY

SEQ ID NO: 365 - protein, 3 aa, Artificial Sequence
  Synthetic Construct
LGS

SEQ ID NO: 366 - protein, 8 aa, Artificial Sequence
  Synthetic Construct
MQAQQSWT

SEQ ID NO: 367 - protein, 118 aa, Artificial Sequence
  Synthetic Construct
  misc_feature (3)..(4): Xaa can be any naturally occurring amino acid
EVXXVESGGGLVQPGGALRLSCSASGFTFEDYTMHWVRQFPGGGLEWVSNIHWNSEKRDYADSVKGRFTISRDNAKNSLYLEMNNVRGEDTAFYYCVKDSGLRSLQYWGQGTLVTVSS

SEQ ID NO: 368 - protein, 111 aa, Artificial Sequence
  Synthetic Construct
  misc_feature (3)..(4): Xaa can be any naturally occurring amino acid
RCXXTQSPLSLPVTPGEPASISCRSSQSLLHSNGYNYLDWYLQKPGQSPQLLIYLGSNRASGVPDRFSGSGSGTDFTLKISRVEAEDVGVYYCMQAQQSWTFGQGTKVEIK

SEQ ID NO: 369 - protein, 25 aa, Artificial Sequence
  Synthetic Construct
  misc_feature (3)..(4): Xaa can be any naturally occurring amino acid
EVXXVESGGGLVQPGGALRLSCSAS

SEQ ID NO: 370 - protein, 17 aa, Artificial Sequence
  Synthetic Construct
MHWVRQFPGGGLEWVSN

SEQ ID NO: 371 - protein, 38 aa, Artificial Sequence
  Synthetic Construct
DYADSVKGRFTISRDNAKNSLYLEMNNVRGEDTAFYYC

SEQ ID NO: 372 - protein, 11 aa, Artificial Sequence
  Synthetic Construct
WGQGTLVTVSS

SEQ ID NO: 373 - protein, 26 aa, Artificial Sequence
  Synthetic Construct
  misc_feature (3)..(4): Xaa can be any naturally occurring amino acid
RCXXTQSPLSLPVTPGEPASISCRSS

SEQ ID NO: 374 - protein, 17 aa, Artificial Sequence
  Synthetic Construct
LDWYLQKPGQSPQLLIY

SEQ ID NO: 375 - protein, 36 aa, Artificial Sequence; identical to SEQ ID NO: 15
  Synthetic Construct

SEQ ID NO: 376 - protein, 10 aa, Artificial Sequence
  Synthetic Construct
FGQGTKVEIK

SEQ ID NO: 377 - protein, 445 aa, Artificial Sequence
  Synthetic Construct
  misc_feature (3)..(4): Xaa can be any naturally occurring amino acid
  misc_feature (142)..(142): Xaa can be any naturally occurring amino acid
  misc_feature (212)..(212): Xaa can be any naturally occurring amino acid
  misc_feature (356)..(356): Xaa can be any naturally occurring amino acid
EVXXVESGGGLVQPGGALRLSCSASGFTFEDYTMHWVRQFPGGGLEWVSNIHWNSEKRDYADSVKGRFTISRDNAKNSLYLEMNNVRGEDTAFYYCVKDSGLRSLQYWGQGTLVTVSSKGPSVFPLAPSSKSTSGGTAALGXLVKDYFPEPVTVSWNSGALTSGVHTFPAVLQSSGLYSLSSVVTVPSSSLGTQTYICNVNHKPSNTKVDKXVEPKSCDKTHTCPPCPAPELLGGPSVFLFPPKPKDTLMISRTPEVTCVVVDVSHEDPEVKFNWYVDGVEVHNAKTKPREEQYNSTYRVVSVLTVLHQDWLNGKEYKCKVSNKALPAPIEKTISKAKGQPREPQVYTLPPSRDEXTKNQVSLTCLVKGFYPSDIAVEWESNGQPENNYKTTPPVLDSDGSFFLYSKLTVDKSRWQQGNVFSCSVMHEALHNHYTQKSLSLSPGK

SEQ ID NO: 378 - protein, 211 aa, Artificial Sequence
  Synthetic Construct
  misc_feature (1)..(1): Xaa can be any naturally occurring amino acid
  misc_feature (3)..(3): Xaa can be any naturally occurring amino acid
XIXETQSPSSLSASVGDRVTITCRASQSISTYLNWYQQKPGKAPNLLIYAASSLHSGVPSRFRGSGSGTDFTLTITSLQPDDFATYYCHQSYSAPRTFGQGTTVEIKAPSVFIFPPSDEQLKSGTASVVCLLNNFYPREAKVQWKVDNALQSGNSQESVTEQDSKDSTYSLSSTLTLSKADYEKHKVYACEVTHQGLSSPVTKSFNRGECK

SEQ ID NO: 379 - DNA, 355 bp, Artificial Sequence
  Synthetic Construct
  misc_feature (8)..(11): n is a, c, g, t or u
gaggtgcnnnnggtggagtctgggggaggcctggtacagcctggcggggccctgagactctcctgctcagcctctggattcacttttgaagattacacaatgcactgggtccggcaatttccaggggggggcctggagtgggtctcaaatattcattggaatagtgaaaaaagagactatgcggactctgtgaagggccggttcaccatctccagagacaacgccaagaactccctgtatttggaaatgaacaatgtgcgaggtgaagacacggccttctattactgtgtaaaagattcggggctacggtcccttcagtactggggccagggaaccctggtcaccgtctcctcag

SEQ ID NO: 380 - DNA, 322 bp, Artificial Sequence
  Synthetic Construct
  misc_feature (1)..(1): n is a, c, g, t or u
  misc_feature (8)..(9): n is a, c, g, t or u
nacatccnngagacccagtctccatcttccctgtctgcatctgtaggagacagagtcaccatcacttgccgggcaagtcagagcattagcacctatttaaattggtatcaacaaaaaccagggaaagcccctaacctcctgatctatgctgcatccagtttgcacagtggggtcccatcaaggttcagggggagtggatctgggacagatttcactctcaccatcaccagtctgcaacctgacgattttgccacttactactgtcaccagagttacagtgcccctcgaacattcggccaagggaccacggtggaaatcaaac

SEQ ID NO: 381 - protein, 8 aa, Artificial Sequence
  Synthetic Construct
GFSFSDSY

SEQ ID NO: 382 - protein, 8 aa, Artificial Sequence
  Synthetic Construct
ISGSGEII

SEQ ID NO: 383 - protein, 14 aa, Artificial Sequence
  Synthetic Construct
ARPSDYFETSEELD

SEQ ID NO: 384 - protein, 6 aa, Artificial Sequence
  Synthetic Construct
QSISTY

SEQ ID NO: 385 - protein, 3 aa, Artificial Sequence
  Synthetic Construct
AAS

SEQ ID NO: 386 - protein, 9 aa, Artificial Sequence
  Synthetic Construct
HQSYSAPRT

SEQ ID NO: 387 - protein, 120 aa, Artificial Sequence
  Synthetic Construct
  misc_feature (2)..(3): Xaa can be any naturally occurring amino acid
VXXVQSGGGLVKPGGSLRLSCTASGFSFSDSYMSWIRQAPGKGLEWLTYISGSGEIISYADSVKGRFTISRDNAKKSVYLQMDSLRAEDTAVYYCARPSDYFETSEELDWGQGTLVTVSS

SEQ ID NO: 388 - protein, 107 aa, Artificial Sequence
  Synthetic Construct
  misc_feature (1)..(1): Xaa can be any naturally occurring amino acid
  misc_feature (3)..(3): Xaa can be any naturally occurring amino acid
XIXETQSPSSLSASVGDRVTITCRASQSISTYLNWYQQKPGKAPNLLIYAASSLHSGVPSRFRGSGSGTDFTLTITSLQPDDFATYYCHQSYSAPRTFGQGTTVEIK

SEQ ID NO: 389 - protein, 24 aa, Artificial Sequence
  Synthetic Construct
  misc_feature (2)..(3): Xaa can be any naturally occurring amino acid
VXXVQSGGGLVKPGGSLRLSCTAS

SEQ ID NO: 390 - protein, 17 aa, Artificial Sequence
  Synthetic Construct
MSWIRQAPGKGLEWLTY

SEQ ID NO: 391 - protein, 38 aa, Artificial Sequence
  Synthetic Construct
SYADSVKGRFTISRDNAKKSVYLQMDSLRAEDTAVYYC

SEQ ID NO: 392 - protein, 11 aa, Artificial Sequence
  Synthetic Construct
WGQGTLVTVSS

SEQ ID NO: 393 - protein, 26 aa, Artificial Sequence
  Synthetic Construct
  misc_feature (1)..(1): Xaa can be any naturally occurring amino acid
  misc_feature (3)..(3): Xaa can be any naturally occurring amino acid
XIXETQSPSSLSASVGDRVTITCRAS

SEQ ID NO: 394 - protein, 17 aa, Artificial Sequence
  Synthetic Construct
LNWYQQKPGKAPNLLIY

SEQ ID NO: 395 - protein, 36 aa, Artificial Sequence
  Synthetic Construct
SLHSGVPSRFRGSGSGTDFTLTITSLQPDDFATYYC

SEQ ID NO: 396 - protein, 10 aa, Artificial Sequence
  Synthetic Construct
FGQGTTVEIK

SEQ ID NO: 397 - protein, 447 aa, Artificial Sequence
  Synthetic Construct
  misc_feature (2)..(3): Xaa can be any naturally occurring amino acid
  misc_feature (144)..(144): Xaa can be any naturally occurring amino acid
  misc_feature (214)..(214): Xaa can be any naturally occurring amino acid
  misc_feature (358)..(358): Xaa can be any naturally occurring amino acid
VXXVQSGGGLVKPGGSLRLSCTASGFSFSDSYMSWIRQAPGKGLEWLTYISGSGEIISYADSVKGRFTISRDNAKKSVYLQMDSLRAEDTAVYYCARPSDYFETSEELDWGQGTLVTVSSKGPSVFPLAPSSKSTSGGTAALGXLVKDYFPEPVTVSWNSGALTSGVHTFPAVLQSSGLYSLSSVVTVPSSSLGTQTYICNVNHKPSNTKVDKXVEPKSCDKTHTCPPCPAPELLGGPSVFLFPPKPKDTLMISRTPEVTCVVVDVSHEDPEVKFNWYVDGVEVHNAKTKPREEQYNSTYRVVSVLTVLHQDWLNGKEYKCKVSNKALPAPIEKTISKAKGQPREPQVYTLPPSRDEXTKNQVSLTCLVKGFYPSDIAVEWESNGQPENNYKTTPPVLDSDGSFFLYSKLTVDKSRWQQGNVFSCSVMHEALHNHYTQKSLSLSPGK

SEQ ID NO: 398 - protein, 208 aa, Artificial Sequence
  Synthetic Construct
TQSPSSLSASVGDRVTITCQASQDISKSLNWYHQKPGKAPTVLIYDASNLETGVPSRFSGSGSGTEFTFTISSLQSEDFGTYYCQQYDNVPMYTFGQGTKVETKAPSVFIFPPSDEQLKSGTASVVCLLNNFYPREAKVQWKVDNALQSGNSQESVTEQDSKDSTYSLSSTLTLSKADYEKHKVYACEVTHQGLSSPVTKSFNRGECK

SEQ ID NO: 399 - DNA, 363 bp, Artificial Sequence
  Synthetic Construct
  misc_feature (8)..(9): n is a, c, g, t or u
  misc_feature (11)..(11): n is a, c, g, t or u
aggtgcanncngtgcagtctgggggaggcttggtcaagcctggagggtccctcagactctcctgcacagcctctggattcagcttcagtgactcctacatgagctggatccgccaggctccagggaagggtctggagtggctgacatacatcagtggtagtggtgaaatcatttcctacgcggactctgtgaagggccgattcaccatctccagggacaacgccaagaagtcagtgtatctgcaaatggacagcctgagagccgaggacacggccgtctattactgtgcgcggccctccgattattttgaaactagtgaagagctggactggggccagggaaccctggtcaccgtctcctcag

SEQ ID NO: 400 - DNA, 314 bp, Artificial Sequence
  Synthetic Construct
gacccagtctccatcctccctgtctgcatctgtaggagacagagtcactatcacttgccaggcgagtcaggacatcagtaaatctttaaattggtatcaccagaaaccagggaaagcccctacggtcctgatctacgatgcatccaatttggaaacaggggtcccatcaaggttcagtggaagtggatctgggacagagtttactttcaccatcagcagcctgcagagtgaagattttggaacatattactgtcaacagtatgataatgtccccatgtacacttttggtcaggggaccaaggtggagacgaaac

SEQ ID NO: 401 - protein, 8 aa, Artificial Sequence
  Synthetic Construct
GMSISSYY

SEQ ID NO: 402 - protein, 7 aa, Artificial Sequence
  Synthetic Construct
IFTTGST

SEQ ID NO: 403 - protein, 17 aa, Artificial Sequence
  Synthetic Construct
ARLRRVVVPRVSWYFDL

SEQ ID NO: 404 - protein, 6 aa, Artificial Sequence
  Synthetic Construct
QDISKS

SEQ ID NO: 405 - protein, 3 aa, Artificial Sequence
  Synthetic Construct
DAS

SEQ ID NO: 406 - protein, 10 aa, Artificial Sequence
  Synthetic Construct
QQYDNVPMYT

SEQ ID NO: 407 - protein, 123 aa, Artificial Sequence
  Synthetic Construct
RCKLQESGPGLVKPSESLSLTCNVSGMSISSYYWSWIRQPAGKGLEWIGRIFTTGSTKDNPSLKSRVTMSVDTSRNQFSLTLTSVTAADTAVYYCARLRRVVVPRVSWYFDLWGHGTLVTVSS

SEQ ID NO: 408 - protein, 104 aa, Artificial Sequence
  Synthetic Construct
TQSPSSLSASVGDRVTITCQASQDISKSLNWYHQKPGKAPTVLIYDASNLETGVPSRFSGSGSGTEFTFTISSLQSEDFGTYYCQQYDNVPMYTFGQGTKVETK

SEQ ID NO: 409 - protein, 25 aa, Artificial Sequence
  Synthetic Construct
RCKLQESGPGLVKPSESLSLTCNVS

SEQ ID NO: 410 - protein, 17 aa, Artificial Sequence
  Synthetic Construct
WSWIRQPAGKGLEWIGR

SEQ ID NO: 411 - protein, 38 aa, Artificial Sequence
  Synthetic Construct
KDNPSLKSRVTMSVDTSRNQFSLTLTSVTAADTAVYYC

SEQ ID NO: 412 - protein, 11 aa, Artificial Sequence
  Synthetic Construct
WGHGTLVTVSS

SEQ ID NO: 413 - protein, 22 aa, Artificial Sequence
  Synthetic Construct
TQSPSSLSASVGDRVTITCQAS

SEQ ID NO: 414 - protein, 17 aa, Artificial Sequence
  Synthetic Construct
LNWYHQKPGKAPTVLIY

SEQ ID NO: 415 - protein, 36 aa, Artificial Sequence
  Synthetic Construct
NLETGVPSRFSGSGSGTEFTFTISSLQSEDFGTYYC

SEQ ID NO: 416 - protein, 10 aa, Artificial Sequence
  Synthetic Construct
FGQGTKVETK

SEQ ID NO: 417 - protein, 450 aa, Artificial Sequence
  Synthetic Construct
  misc_feature (147)..(147): Xaa can be any naturally occurring amino acid
  misc_feature (217)..(217): Xaa can be any naturally occurring amino acid
  misc_feature (361)..(361): Xaa can be any naturally occurring amino acid
RCKLQESGPGLVKPSESLSLTCNVSGMSISSYYWSWIRQPAGKGLEWIGRIFTTGSTKDNPSLKSRVTMSVDTSRNQFSLTLTSVTAADTAVYYCARLRRVVVPRVSWYFDLWGHGTLVTVSSKGPSVFPLAPSSKSTSGGTAALGXLVKDYFPEPVTVSWNSGALTSGVHTFPAVLQSSGLYSLSSVVTVPSSSLGTQTYICNVNHKPSNTKVDKXVEPKSCDKTHTCPPCPAPELLGGPSVFLFPPKPKDTLMISRTPEVTCVVVDVSHEDPEVKFNWYVDGVEVHNAKTKPREEQYNSTYRVVSVLTVLHQDWLNGKEYKCKVSNKALPAPIEKTISKAKGQPREPQVYTLPPSRDEXTKNQVSLTCLVKGFYPSDIAVEWESNGQPENNYKTTPPVLDSDGSFFLYSKLTVDKSRWQQGNVFSCSVMHEALHNHYTQKSLSLSPGK

SEQ ID NO: 418 - protein, 217 aa, Artificial Sequence
  Synthetic Construct
  misc_feature (3)..(4): Xaa can be any naturally occurring amino acid
DIXXTQSPDSVAVSLGQRATINCESSQSVFDDSSNKNYLAWYQHKPGQPPKLLIYWASSRESGVPDRFIGSGSGTDFTLTISSLQAADVAVYYCLQYYSTPHSFGQGTKVAINAPSVFIFPPSDEQLKSGTASVVCLLNNFYPREAKVQWKVDNALQSGNSQESVTEQDSKDSTYSLSSTLTLSKADYEKHKVYACEVTHQGLSSPVTKSFNRGECK

SEQ ID NO: 419 - DNA, 370 bp, Artificial Sequence
  Synthetic Construct
aggtgcaagctgcaggagtcgggcccaggactggtgaagccttcggagagcctgtccctcacctgcaatgtctctggtatgtccatcagtagttattactggagctggatccgacagcccgccgggaagggactggagtggattgggcgtatatttaccactgggagcaccaaggacaatccctccctcaagagtcgagtcaccatgtcagtagacacgtcgaggaaccagttctccctgaccctgacatctgtgaccgccgcggacacggccgtatattactgtgcgagactgaggcgggttgttgttcctcgggtctcctggtacttcgatctctggggccatggcaccctggtcactgtctcctcag

SEQ ID NO: 420 - DNA, 340 bp, Artificial Sequence
  Synthetic Construct
  misc_feature (8)..(12): n is a, c, g, t or u
gacatcgnnnnnacccagtctccagactccgtggctgtgtctctgggccagagggccaccatcaactgcgagtccagccagagtgttttcgatgactccagcaataagaactacttagcttggtatcaacacaaaccaggacagcctcctaaactactcatttactgggcatctagccgggaatccggggtccctgaccgattcattggcagcgggtctgggacagacttcactctcaccatcagcagcctgcaggctgctgatgtggcagtttattactgtcttcaatattatagtactcctcactcttttggccaggggaccaaggtggcgattaacc

SEQ ID NO: 421 - protein, 8 aa, Artificial Sequence
  Synthetic Construct
GYSFTRFD

SEQ ID NO: 422 - protein, 8 aa, Artificial Sequence
  Synthetic Construct
MNPKSGHS

SEQ ID NO: 423 - protein, 8 aa, Artificial Sequence
  Synthetic Construct
  misc_feature (8)..(8): Xaa can be any naturally occurring amino acid
ARGVDNRX

SEQ ID NO: 424 - protein, 12 aa, Artificial Sequence
  Synthetic Construct
QSVFDDSSNKNY

SEQ ID NO: 425 - protein, 3 aa, Artificial Sequence
  Synthetic Construct
WAS

SEQ ID NO: 426 - protein, 9 aa, Artificial Sequence
  Synthetic Construct
LQYYSTPHS

SEQ ID NO: 427 - protein, 109 aa, Artificial Sequence
  Synthetic Construct
  misc_feature (98)..(98): Xaa can be any naturally occurring amino acid
SGAEVKKPGASVKVSCKTSGYSFTRFDINWVRQATGQGLEWMGWMNPKSGHSGPAQKFQGRITMTVNTSISTAYMELSSLRFEDTAVYYCARGVDNRXWGQGTLITVSS

SEQ ID NO: 428 - protein, 113 aa, Artificial Sequence
  Synthetic Construct
  misc_feature (3)..(4): Xaa can be any naturally occurring amino acid
DIXXTQSPDSVAVSLGQRATINCESSQSVFDDSSNKNYLAWYQHKPGQPPKLLIYWASSRESGVPDRFIGSGSGTDFTLTISSLQAADVAVYYCLQYYSTPHSFGQGTKVAIN

SEQ ID NO: 429 - protein, 19 aa, Artificial Sequence
  Synthetic Construct
SGAEVKKPGASVKVSCKTS

SEQ ID NO: 430 - protein, 17 aa, Artificial Sequence
  Synthetic Construct
INWVRQATGQGLEWMGW

SEQ ID NO: 431 - protein, 38 aa, Artificial Sequence
  Synthetic Construct
GPAQKFQGRITMTVNTSISTAYMELSSLRFEDTAVYYC

SEQ ID NO: 432 - protein, 11 aa, Artificial Sequence
  Synthetic Construct
WGQGTLITVSS

SEQ ID NO: 433 - protein, 26 aa, Artificial Sequence
  Synthetic Construct
  misc_feature (3)..(4): Xaa can be any naturally occurring amino acid
DIXXTQSPDSVAVSLGQRATINCESS

SEQ ID NO: 434 - protein, 17 aa, Artificial Sequence
  Synthetic Construct
LAWYQHKPGQPPKLLIY

SEQ ID NO: 435 - protein, 36 aa, Artificial Sequence
  Synthetic Construct
SRESGVPDRFIGSGSGTDFTLTISSLQAADVAVYYC

SEQ ID NO: 436 - protein, 10 aa, Artificial Sequence
  Synthetic Construct
FGQGTKVAIN

SEQ ID NO: 437 - protein, 436 aa, Artificial Sequence
  Synthetic Construct
  misc_feature (98)..(98): Xaa can be any naturally occurring amino acid
  misc_feature (133)..(133): Xaa can be any naturally occurring amino acid
  misc_feature (203)..(203): Xaa can be any naturally occurring amino acid
  misc_feature (347)..(347): Xaa can be any naturally occurring amino acid
SGAEVKKPGASVKVSCKTSGYSFTRFDINWVRQATGQGLEWMGWMNPKSGHSGPAQKFQGRITMTVNTSISTAYMELSSLRFEDTAVYYCARGVDNRXWGQGTLITVSSKGPSVFPLAPSSKSTSGGTAALGXLVKDYFPEPVTVSWNSGALTSGVHTFPAVLQSSGLYSLSSVVTVPSSSLGTQTYICNVNHKPSNTKVDKXVEPKSCDKTHTCPPCPAPELLGGPSVFLFPPKPKDTLMISRTPEVTCVVVDVSHEDPEVKFNWYVDGVEVHNAKTKPREEQYNSTYRVVSVLTVLHQDWLNGKEYKCKVSNKALPAPIEKTISKAKGQPREPQVYTLPPSRDEXTKNQVSLTCLVKGFYPSDIAVEWESNGQPENNYKTTPPVLDSDGSFFLYSKLTVDKSRWQQGNVFSCSVMHEALHNHYTQKSLSLSPGK

SEQ ID NO: 438 - protein, 217 aa, Artificial Sequence; identical to SEQ ID NO: 418
  Synthetic Construct
  misc_feature (3)..(4): Xaa can be any naturally occurring amino acid

SEQ ID NO: 439 - DNA, 330 bp, Artificial Sequence
  Synthetic Construct
  misc_feature (294)..(295): n is a, c, g, t or u
agtctggggctgaggtgaagaagcctggggcctcagtgaaggtctcctgcaagacttctggatacagcttcacccgttttgatatcaactgggtgcgacaggccactggacaagggcttgagtggatgggatggatgaaccctaagagtggtcactcaggccctgcacagaagttccagggcagaatcaccatgaccgttaacacctccataagtacagcctacatggagctgagcagcctgagatttgaggacacggccgtttattattgtgcgcgaggcgtggataatcgtnnctggggccagggaaccctaatcaccgtctcctcag

SEQ ID NO: 440 - DNA, 340 bp, Artificial Sequence; identical to SEQ ID NO: 420
  Synthetic Construct
  misc_feature (8)..(12): n is a, c, g, t or u

SEQ ID NO: 441 - protein, 172 aa, Artificial Sequence
  Synthetic Construct
MAKLTILVALALFLLAAHASARQQWELQGDRRCQSQLERANLRPCEQHLMQKIQRDEDSYGRDPYSPSQDPYSPSQDPDRRDPYSPSPYDRRGAGSSQHQERCCNELNEFENNQRCMCEALQQIMENQSDRLQGRQQEQQFKRELRNLPQQCGLRAPQRCDLEVESGGRDRY

SEQ ID NO: 442 - protein, 8 aa, Artificial Sequence
  Synthetic Construct
GFTFRDYS

SEQ ID NO: 443 - protein, 8 aa, Artificial Sequence
  Synthetic Construct
IRFDGTTK

SEQ ID NO: 444 - protein, 11 aa, Artificial Sequence
  Synthetic Construct
VKDNGWRAFDH

SEQ ID NO: 445 - protein, 11 aa, Artificial Sequence
  Synthetic Construct
QSLLHRNGYIY

SEQ ID NO: 446 - protein, 3 aa, Artificial Sequence
  Synthetic Construct
FVS

SEQ ID NO: 447 - protein, 9 aa, Artificial Sequence
  Synthetic Construct
MQSLENPWT

SEQ ID NO: 448 - protein, 114 aa, Artificial Sequence
  Synthetic Construct
VESGGGVVQPGASLRLSCVASGFTFRDYSMHWVRQAPGKGLEWMSFIRFDGTTKDYRESVKGRFIISRDDSKNTLYLQMTSLRPEDTARYYCVKDNGWRAFDHWGQGALVIVSS

SEQ ID NO: 449 - protein, 105 aa, Artificial Sequence
  Synthetic Construct
EIVMTQSPLSLPVTPGEAASISCRSSQSLLHRNGYIYLDWYLQRPGQSPQLLISFVSKRASGAPDRFSGSGSGTDFTLTISRVEAEDFGVYFCMQSLENPWTFGP

SEQ ID NO: 450 - protein, 21 aa, Artificial Sequence
  Synthetic Construct
VESGGGVVQPGASLRLSCVAS

SEQ ID NO: 451 - protein, 17 aa, Artificial Sequence
  Synthetic Construct
MHWVRQAPGKGLEWMSF

SEQ ID NO: 452 - protein, 38 aa, Artificial Sequence
  Synthetic Construct
DYRESVKGRFIISRDDSKNTLYLQMTSLRPEDTARYYC

SEQ ID NO: 453 - protein, 11 aa, Artificial Sequence
  Synthetic Construct
WGQGALVIVSS

SEQ ID NO: 454 - protein, 26 aa, Artificial Sequence
  Synthetic Construct
EIVMTQSPLSLPVTPGEAASISCRSS

SEQ ID NO: 455 - protein, 17 aa, Artificial Sequence
  Synthetic Construct
LDWYLQRPGQSPQLLIS

SEQ ID NO: 456 - protein, 36 aa, Artificial Sequence
  Synthetic Construct
KRASGAPDRFSGSGSGTDFTLTISRVEAEDFGVYFC

SEQ ID NO: 457 - protein, 3 aa, Artificial Sequence
  Synthetic Construct
FGP

SEQ ID NO: 458 - protein, 441 aa, Artificial Sequence
  Synthetic Construct
  misc_feature (138)..(138): Xaa can be any naturally occurring amino acid
  misc_feature (208)..(208): Xaa can be any naturally occurring amino acid
  misc_feature (352)..(352): Xaa can be any naturally occurring amino acid
VESGGGVVQPGASLRLSCVASGFTFRDYSMHWVRQAPGKGLEWMSFIRFDGTTKDYRESVKGRFIISRDDSKNTLYLQMTSLRPEDTARYYCVKDNGWRAFDHWGQGALVIVSSKGPSVFPLAPSSKSTSGGTAALGXLVKDYFPEPVTVSWNSGALTSGVHTFPAVLQSSGLYSLSSVVTVPSSSLGTQTYICNVNHKPSNTKVDKXVEPKSCDKTHTCPPCPAPELLGGPSVFLFPPKPKDTLMISRTPEVTCVVVDVSHEDPEVKFNWYVDGVEVHNAKTKPREEQYNSTYRVVSVLTVLHQDWLNGKEYKCKVSNKALPAPIEKTISKAKGQPREPQVYTLPPSRDEXTKNQVSLTCLVKGFYPSDIAVEWESNGQPENNYKTTPPVLDSDGSFFLYSKLTVDKSRWQQGNVFSCSVMHEALHNHYTQKSLSLSPGK

SEQ ID NO: 459 - protein, 209 aa, Artificial Sequence
  Synthetic Construct
EIVMTQSPLSLPVTPGEAASISCRSSQSLLHRNGYIYLDWYLQRPGQSPQLLISFVSKRASGAPDRFSGSGSGTDFTLTISRVEAEDFGVYFCMQSLENPWTFGPAPSVFIFPPSDEQLKSGTASVVCLLNNFYPREAKVQWKVDNALQSGNSQESVTEQDSKDSTYSLSSTLTLSKADYEKHKVYACEVTHQGLSSPVTKSFNRGECK

SEQ ID NO: 460 - DNA, 344 bp, Artificial Sequence
  Synthetic Construct
ggtggagtcggggggcggcgtggtccagcctggggcgtccctgagactctcctgtgtggcgtctggattcacctttcgtgactattccatgcactgggtccgccaggctccaggcaaggggctggagtggatgtcatttatacggtttgatgggaccactaaggactatcgagagtctgtgaagggccgattcatcatttccagagacgactccaagaacacactgtatctgcaaatgacgagcctgagacctgaggacacggctcgatattactgtgtgaaagacaatgggtggcgggcctttgaccactggggccagggagccctggtcatcgtctcctcag

SEQ ID NO: 461 - DNA, 316 bp, Artificial Sequence
  Synthetic Construct
gagattgtgatgactcagtctccactctccctgcccgtcacccctggagaggcggcctccatctcctgcaggtctagtcagagcctcctccatcgtaatggatacatctacttggactggtacctgcagaggccagggcagtcaccacaactcctgatctctttcgtttctaaacgggcctccggggcccctgacaggttcagtggctctggttcaggcacagatttcacactgacaattagtagagtggaggctgaggactttggggtttatttctgcatgcaatcgctagaaaacccctggacgttcggcccag

SEQ ID NO: 462 - protein, 8 aa, Artificial Sequence
  Synthetic Construct
GFTFRDYS

SEQ ID NO: 463 - protein, 8 aa, Artificial Sequence
  Synthetic Construct
IRFDGTTK

SEQ ID NO: 464 - protein, 11 aa, Artificial Sequence
  Synthetic Construct
AKDNGWRAFDH

SEQ ID NO: 465 - protein, 11 aa, Artificial Sequence
  Synthetic Construct
QSLLHRNGYIY

SEQ ID NO: 466 - protein, 3 aa, Artificial Sequence
  Synthetic Construct
FVS

SEQ ID NO: 467 - protein, 9 aa, Artificial Sequence
  Synthetic Construct
MQALETPWT

SEQ ID NO: 468 - protein, 111 aa, Artificial Sequence
  Synthetic Construct
GGGVVQPGTSLRLSCVASGFTFRDYSMHWVRQAPGKGLEWVSFIRFDGTTKDYRDSVKGRFIISRDDSKNTLYLQMTSLRVEDTALYYCAKDNGWRAFDHWGQGALVTVSS

SEQ ID NO: 469 - protein, 110 aa, Artificial Sequence
  Synthetic Construct
VMTQSPLSLPVTPGEAASISCRSSQSLLHRNGYIYLDWYLQRPGQSPQLLISFVSKRASGAPDRFSGSGSGTDFTLTISRVEAEDFGVYFCMQALETPWTFGPGTKLEIK

SEQ ID NO: 470 - protein, 18 aa, Artificial Sequence
  Synthetic Construct
GGGVVQPGTSLRLSCVAS

SEQ ID NO: 471 - protein, 17 aa, Artificial Sequence
  Synthetic Construct
MHWVRQAPGKGLEWVSF

SEQ ID NO: 472 - protein, 38 aa, Artificial Sequence
  Synthetic Construct
DYRDSVKGRFIISRDDSKNTLYLQMTSLRVEDTALYYC

SEQ ID NO: 473 - protein, 11 aa, Artificial Sequence
  Synthetic Construct
WGQGALVTVSS

SEQ ID NO: 474 - protein, 24 aa, Artificial Sequence
  Synthetic Construct
VMTQSPLSLPVTPGEAASISCRSS

SEQ ID NO: 475 - protein, 17 aa, Artificial Sequence
  Synthetic Construct
LDWYLQRPGQSPQLLIS

SEQ ID NO: 476 - protein, 36 aa, Artificial Sequence; identical to SEQ ID NO: 456
  Synthetic Construct

SEQ ID NO: 477 - protein, 10 aa, Artificial Sequence
  Synthetic Construct
FGPGTKLEIK

SEQ ID NO: 478 - protein, 438 aa, Artificial Sequence
  Synthetic Construct
  misc_feature (135)..(135): Xaa can be any naturally occurring amino acid
  misc_feature (205)..(205): Xaa can be any naturally occurring amino acid
  misc_feature (349)..(349): Xaa can be any naturally occurring amino acid
GGGVVQPGTSLRLSCVASGFTFRDYSMHWVRQAPGKGLEWVSFIRFDGTTKDYRDSVKGRFIISRDDSKNTLYLQMTSLRVEDTALYYCAKDNGWRAFDHWGQGALVTVSSKGPSVFPLAPSSKSTSGGTAALGXLVKDYFPEPVTVSWNSGALTSGVHTFPAVLQSSGLYSLSSVVTVPSSSLGTQTYICNVNHKPSNTKVDKXVEPKSCDKTHTCPPCPAPELLGGPSVFLFPPKPKDTLMISRTPEVTCVVVDVSHEDPEVKFNWYVDGVEVHNAKTKPREEQYNSTYRVVSVLTVLHQDWLNGKEYKCKVSNKALPAPIEKTISKAKGQPREPQVYTLPPSRDEXTKNQVSLTCLVKGFYPSDIAVEWESNGQPENNYKTTPPVLDSDGSFFLYSKLTVDKSRWQQGNVFSCSVMHEALHNHYTQKSLSLSPGK

SEQ ID NO: 479 - protein, 214 aa, Artificial Sequence
  Synthetic Construct
VMTQSPLSLPVTPGEAASISCRSSQSLLHRNGYIYLDWYLQRPGQSPQLLISFVSKRASGAPDRFSGSGSGTDFTLTISRVEAEDFGVYFCMQALETPWTFGPGTKLEIKAPSVFIFPPSDEQLKSGTASVVCLLNNFYPREAKVQWKVDNALQSGNSQESVTEQDSKDSTYSLSSTLTLSKADYEKHKVYACEVTHQGLSSPVTKSFNRGECK

SEQ ID NO: 480 - DNA, 336 bp, Artificial Sequence
  Synthetic Construct
cggggggcggcgtggtccagcctgggacgtccctgagactctcctgtgtagcgtctggattcaccttccgtgactattccatgcactgggtccgccaggctccaggcaaggggctggagtgggtgtcatttatacggtttgatgggaccactaaggactatcgagactctgtgaagggccgattcatcatctccagagacgactccaagaacacactgtatctgcagatgacgagcctgagagttgaggacacggctttatattactgtgcgaaagacaatgggtggcgggcctttgaccactggggccagggagccctggtcaccgtctcctcag

SEQ ID NO: 481 - DNA, 331 bp, Artificial Sequence
  Synthetic Construct
gtgatgactcagtctccactctccctgcccgtcacccctggagaggcggcctccatctcctgcaggtctagtcagagcctcctccatcgtaatggatacatctacttggattggtacctgcagaggccagggcagtctccacaactcctgatctctttcgtttctaaacgggcctccggggcccctgacaggttcagtggctctggttcaggcacagattttacactgacaatcagcagagtggaggctgaggattttggggtttatttctgcatgcaagcgctagaaaccccctggacgttcggcccagggaccaaactggagatcaaac

SEQ ID NO: 482 - protein, 8 aa, Artificial Sequence
  Synthetic Construct
GDSISSYY

SEQ ID NO: 483 - protein, 7 aa, Artificial Sequence
  Synthetic Construct
IFTSGST

SEQ ID NO: 484 - protein, 19 aa, Artificial Sequence
  Synthetic Construct
ARDRRALSSDGNWYWYFDL

SEQ ID NO: 485 - protein, 6 aa, Artificial Sequence
  Synthetic Construct
QTITRN

SEQ ID NO: 486 - protein, 3 aa, Artificial Sequence
  Synthetic Construct
GAS

SEQ ID NO: 487 - protein, 9 aa, Artificial Sequence
  Synthetic Construct
QQSDNTPRT

SEQ ID NO: 488 - protein, 120 aa, Artificial Sequence
  Synthetic Construct
ESGPRLVKPSETLSLTCIVSGDSISSYYWGWIRQPAGRGLEWIGRIFTSGSTTYNPSLKSRVSMSVETSKNQFSLTLTSVTAADTAVYFCARDRRALSSDGNWYWYFDLWGRGTLVAVSS

SEQ ID NO: 489 - protein, 103 aa, Artificial Sequence
  Synthetic Construct
TQSPSSLSASVGDRVTITCRASQTITRNLNWYQQKSGEAPKLLIYGASILQSGVPSRFTGSGSGTDFTLTISNLQPEDFASYSCQQSDNTPRTFGQGTKVEIK

SEQ ID NO: 490 - protein, 20 aa, Artificial Sequence
  Synthetic Construct
ESGPRLVKPSETLSLTCIVS

SEQ ID NO: 491 - protein, 17 aa, Artificial Sequence
  Synthetic Construct
WGWIRQPAGRGLEWIGR

SEQ ID NO: 492 - protein, 38 aa, Artificial Sequence
  Synthetic Construct
TYNPSLKSRVSMSVETSKNQFSLTLTSVTAADTAVYFC

SEQ ID NO: 493 - protein, 11 aa, Artificial Sequence
  Synthetic Construct
WGRGTLVAVSS

SEQ ID NO: 494 - protein, 22 aa, Artificial Sequence
  Synthetic Construct
TQSPSSLSASVGDRVTITCRAS

SEQ ID NO: 495 - protein, 17 aa, Artificial Sequence
  Synthetic Construct
LNWYQQKSGEAPKLLIY

SEQ ID NO: 496 - protein, 36 aa, Artificial Sequence
  Synthetic Construct
ILQSGVPSRFTGSGSGTDFTLTISNLQPEDFASYSC

SEQ ID NO: 497 - protein, 10 aa, Artificial Sequence
  Synthetic Construct
FGQGTKVEIK

SEQ ID NO: 498 - protein, 447 aa, Artificial Sequence
  Synthetic Construct
  misc_feature (144)..(144): Xaa can be any naturally occurring amino acid
  misc_feature (214)..(214): Xaa can be any naturally occurring amino acid
  misc_feature (358)..(358): Xaa can be any naturally occurring amino acid
ESGPRLVKPSETLSLTCIVSGDSISSYYWGWIRQPAGRGLEWIGRIFTSGSTTYNPSLKSRVSMSVETSKNQFSLTLTSVTAADTAVYFCARDRRALSSDGNWYWYFDLWGRGTLVAVSSKGPSVFPLAPSSKSTSGGTAALGXLVKDYFPEPVTVSWNSGALTSGVHTFPAVLQSSGLYSLSSVVTVPSSSLGTQTYICNVNHKPSNTKVDKXVEPKSCDKTHTCPPCPAPELLGGPSVFLFPPKPKDTLMISRTPEVTCVVVDVSHEDPEVKFNWYVDGVEVHNAKTKPREEQYNSTYRVVSVLTVLHQDWLNGKEYKCKVSNKALPAPIEKTISKAKGQPREPQVYTLPPSRDEXTKNQVSLTCLVKGFYPSDIAVEWESNGQPENNYKTTPPVLDSDGSFFLYSKLTVDKSRWQQGNVFSCSVMHEALHNHYTQKSLSLSPGK

SEQ ID NO: 499 - protein, 207 aa, Artificial Sequence
  Synthetic Construct
TQSPSSLSASVGDRVTITCRASQTITRNLNWYQQKSGEAPKLLIYGASILQSGVPSRFTGSGSGTDFTLTISNLQPEDFASYSCQQSDNTPRTFGQGTKVEIKAPSVFIFPPSDEQLKSGTASVVCLLNNFYPREAKVQWKVDNALQSGNSQESVTEQDSKDSTYSLSSTLTLSKADYEKHKVYACEVTHQGLSSPVTKSFNRGECK

SEQ ID NO: 500 - DNA, 362 bp, Artificial Sequence
  Synthetic Construct
ggagtcgggcccacgactggtgaagccttcggagaccctgtccctcacctgcattgtctctggtgactccatcagtagttattattggggctggatccggcagcccgccgggaggggactggagtggattgggcggatctttaccagcgggagcaccacctataatccctccctcaagagtcgagtctccatgtcagtagagacatccaagaaccagttctccctgacactgacctctgtgaccgccgcggacacggccgtttatttctgtgcgagagatcgaagggcactttcgtctgacggcaactggtactggtacttcgatctctggggccgtggcaccctggtcgctgtctcctcgg

SEQ ID NO: 501 - DNA, 311 bp, Artificial Sequence
  Synthetic Construct
gacccagtctccatcctccctgtctgcatctgtcggagacagagtcaccatcacttgccgggcaagtcagaccattactcggaatttaaattggtatcagcagaaatcaggggaagcccctaagctcctgatctatggtgcatccattttgcaaagtggggtcccatcaaggttcactggcagtggatctgggacagatttcactctcaccatcagtaatctgcaacctgaagattttgcaagttactcctgtcaacagagtgacaataccccgcggacgttcggccaagggaccaaggtggagatcaaac

SEQ ID NO: 502 - protein, 8 aa, Artificial Sequence
  Synthetic Construct
GGSMSSYY

SEQ ID NO: 503 - protein, 7 aa, Artificial Sequence
  Synthetic Construct
IFTTGST

SEQ ID NO: 504 - protein, 19 aa, Artificial Sequence
  Synthetic Construct
VRDRRGRSHDSNWYWYFDL

SEQ ID NO: 505 - protein, 6 aa, Artificial Sequence
  Synthetic Construct
QTLSRN

SEQ ID NO: 506 - protein, 3 aa, Artificial Sequence
  Synthetic Construct
GAS

SEQ ID NO: 507 - protein, 9 aa, Artificial Sequence
  Synthetic Construct
QQSDNTPRT

SEQ ID NO: 508 - protein, 125 aa, Artificial Sequence
  Synthetic Construct
QVQLQESGPGLVKPSETLSLTCTVSGGSMSSYYWGWIRQPAGRGLEWIGRIFTTGSTIYNASLNSRVSMSVDTSKNQFSLKLTSVTAADTALYFCVRDRRGRSHDSNWYWYFDLWGRGTLVTVSS

SEQ ID NO: 509 - protein, 85 aa, Artificial Sequence
  Synthetic Construct
RVIITCRASQTLSRNLNWYQQKPGEAPKLLIYGASTLQSGVPSRFTGSGSGTDFTLIISGLQPEDFATYYCQQSDNTPRTFGQGT

SEQ ID NO: 510 - protein, 25 aa, Artificial Sequence
  Synthetic Construct
QVQLQESGPGLVKPSETLSLTCTVS

SEQ ID NO: 511 - protein, 17 aa, Artificial Sequence
  Synthetic Construct
WGWIRQPAGRGLEWIGR

SEQ ID NO: 512 - protein, 38 aa, Artificial Sequence
  Synthetic Construct
IYNASLNSRVSMSVDTSKNQFSLKLTSVTAADTALYFC

SEQ ID NO: 513 - protein, 11 aa, Artificial Sequence
  Synthetic Construct
WGRGTLVTVSS

SEQ ID NO: 514 - protein, 9 aa, Artificial Sequence
  Synthetic Construct
RVIITCRAS

SEQ ID NO: 515 - protein, 17 aa, Artificial Sequence
  Synthetic Construct
LNWYQQKPGEAPKLLIY

SEQ ID NO: 516 - protein, 36 aa, Artificial Sequence
  Synthetic Construct
TLQSGVPSRFTGSGSGTDFTLIISGLQPEDFATYYC

SEQ ID NO: 517 - protein, 5 aa, Artificial Sequence
  Synthetic Construct
FGQGT

SEQ ID NO: 518 - protein, 452 aa, Artificial Sequence
  Synthetic Construct
  misc_feature (149)..(149): Xaa can be any naturally occurring amino acid
  misc_feature (219)..(219): Xaa can be any naturally occurring amino acid
  misc_feature (363)..(363): Xaa can be any naturally occurring amino acid
QVQLQESGPGLVKPSETLSLTCTVSGGSMSSYYWGWIRQPAGRGLEWIGRIFTTGSTIYNASLNSRVSMSVDTSKNQFSLKLTSVTAADTALYFCVRDRRGRSHDSNWYWYFDLWGRGTLVTVSSKGPSVFPLAPSSKSTSGGTAALGXLVKDYFPEPVTVSWNSGALTSGVHTFPAVLQSSGLYSLSSVVTVPSSSLGTQTYICNVNHKPSNTKVDKXVEPKSCDKTHTCPPCPAPELLGGPSVFLFPPKPKDTLMISRTPEVTCVVVDVSHEDPEVKFNWYVDGVEVHNAKTKPREEQYNSTYRVVSVLTVLHQDWLNGKEYKCKVSNKALPAPIEKTISKAKGQPREPQVYTLPPSRDEXTKNQVSLTCLVKGFYPSDIAVEWESNGQPENNYKTTPPVLDSDGSFFLYSKLTVDKSRWQQGNVFSCSVMHEALHNHYTQKSLSLSPGK

SEQ ID NO: 519 - protein, 189 aa, Artificial Sequence
  Synthetic Construct
RVIITCRASQTLSRNLNWYQQKPGEAPKLLIYGASTLQSGVPSRFTGSGSGTDFTLIISGLQPEDFATYYCQQSDNTPRTFGQGTAPSVFIFPPSDEQLKSGTASVVCLLNNFYPREAKVQWKVDNALQSGNSQESVTEQDSKDSTYSLSSTLTLSKADYEKHKVYACEVTHQGLSSPVTKSFNRGECK

SEQ ID NO: 520 - DNA, 376 bp, Artificial Sequence
  Synthetic Construct
caggtgcagctgcaggagtcgggcccaggactggtgaagccttcggagaccctgtccctcacctgcactgtctctggtggctccatgagtagttactactggggctggatccggcagcccgccgggaggggactggagtggattgggcgaatcttcaccactgggagcaccatctacaacgcctccctcaacagtcgagtctccatgtcagtagacacgtccaagaatcagttctccctgaaactgacctctgtgaccgccgcggacacggccttgtatttctgtgtgagagatcgaagagggcgatcgcatgacagcaactggtactggtacttcgatctctggggccgtggcaccctggtcactgtctcctcgg

SEQ ID NO: 521 - DNA, 258 bp, Artificial Sequence
  Synthetic Construct
cagagtcatcatcacttgccgggcaagtcagacccttagccgcaatttaaattggtatcagcagaaaccaggggaagcccctaaactcctgatctatggtgcatccactttacaaagtggggtcccatcaaggttcactggcagtgggtctgggacagatttcactctcatcattagtggtctgcaacctgaagattttgcaacttactactgtcagcagagtgacaataccccgcggacgttcggccaagggaccaa

SEQ ID NO: 522 - protein, 15 aa, Synthetic Peptide
MAKLTILVALALFLL

SEQ ID NO: 523 - protein, 15 aa, Synthetic Peptide
LTILVALALFLLAAH

SEQ ID NO: 524 - protein, 15 aa, Synthetic Peptide
LVALALFLLAAHASA

SEQ ID NO: 525 - protein, 15 aa, Synthetic Peptide
LALFLLAAHASARQQ

SEQ ID NO: 526 - protein, 15 aa, Synthetic Peptide
FLLAAHASARQQWEL

SEQ ID NO: 527 - protein, 15 aa, Synthetic Peptide
AAHASARQQWELQGD

SEQ ID NO: 528 - protein, 15 aa, Synthetic Peptide
ASARQQWELQGDRRC

SEQ ID NO: 529 - protein, 15 aa, Synthetic Peptide
RQQWELQGDRRCQSQ

SEQ ID NO: 530 - protein, 15 aa, Synthetic Peptide
WELQGDRRCQSQLER

SEQ ID NO: 531 - protein, 15 aa, Synthetic Peptide
QGDRRCQSQLERANL

SEQ ID NO: 532 - protein, 15 aa, Synthetic Peptide
RRCQSQLERANLRPC

SEQ ID NO: 533 - protein, 15 aa, Synthetic Peptide
QSQLERANLRPCEQH

SEQ ID NO: 534 - protein, 15 aa, Synthetic Peptide
LERANLRPCEQHLMQ

SEQ ID NO: 535 - protein, 15 aa, Synthetic Peptide
ANLRPCEQHLMQKIQ

SEQ ID NO: 536 - protein, 15 aa, Synthetic Peptide
RPCEQHLMQKIQRDE

SEQ ID NO: 537 - protein, 15 aa, Synthetic Peptide
EQHLMQKIQRDEDSY

SEQ ID NO: 538 - protein, 15 aa, Synthetic Peptide
LMQKIQRDEDSYGRD

SEQ ID NO: 539 - protein, 15 aa, Synthetic Peptide
KIQRDEDSYGRDPYS

SEQ ID NO: 540 - protein, 15 aa, Synthetic Peptide
RDEDSYGRDPYSZSQ

SEQ ID NO: 541 - protein, 15 aa, Synthetic Peptide
DSYGRDPYSZSQDPY

SEQ ID NO: 542 - protein, 15 aa, Synthetic Peptide
GRDPYSZSQDPYSZS

SEQ ID NO: 543 - protein, 15 aa, Synthetic Peptide
PYSZSQDPYSZSQDP

SEQ ID NO: 544 - protein, 14 aa, Synthetic Peptide
SQDPYSZSQDPDRR

SEQ ID NO: 545 - protein, 15 aa, Synthetic Peptide
DPYSZSQDPDRRDPY

SEQ ID NO: 546 - protein, 15 aa, Synthetic Peptide
SZSQDPDRRDPYSZS

SEQ ID NO: 547 - protein, 15 aa, Synthetic Peptide
QDPDRRDPYSZSPYD

SEQ ID NO: 548 - protein, 15 aa, Synthetic Peptide
DRRDPYSZSPYDRRG

SEQ ID NO: 549 - protein, 15 aa, Synthetic Peptide
DPYSZSPYDRRGAGS

SEQ ID NO: 550 - protein, 15 aa, Synthetic Peptide
SZSPYDRRGAGSSQH

SEQ ID NO: 551 - protein, 15 aa, Synthetic Peptide
PYDRRGAGSSQHQER

SEQ ID NO: 552 - protein, 15 aa, Synthetic Peptide
RRGAGSSQHQERCCN

SEQ ID NO: 553 - protein, 15 aa, Synthetic Peptide
AGSSQHQERCCNELN

SEQ ID NO: 554 - protein, 15 aa, Synthetic Peptide
SQHQERCCNELNEFE

SEQ ID NO: 555 - skipped

SEQ ID NO: 556 - protein, 15 aa, Synthetic Peptide
QERCCNELNEFENNQ

SEQ ID NO: 557 - protein, 15 aa, Synthetic Peptide
CCNELNEFENNQRCM

SEQ ID NO: 558 - protein, 15 aa, Synthetic Peptide
ELNEFENNQRCMCEA

SEQ ID NO: 559 - protein, 15 aa, Synthetic Peptide
EFENNQRCMCEALQQ

SEQ ID NO: 560 - protein, 15 aa, Synthetic Peptide
NNQRCMCEALQQIME

SEQ ID NO: 561 - protein, 15 aa, Synthetic Peptide
RCMCEALQQIMENQS

SEQ ID NO: 562 - protein, 15 aa, Synthetic Peptide
CEALQQIMENQSDRL

SEQ ID NO: 563 - protein, 15 aa, Synthetic Peptide
LQQIMENQSDRLQGR

SEQ ID NO: 564 - protein, 15 aa, Synthetic Peptide
IMENQSDRLQGRQQE

SEQ ID NO: 565 - protein, 15 aa, Synthetic Peptide
NQSDRLQGRQQEQQF

SEQ ID NO: 566 - protein, 15 aa, Synthetic Peptide
DRLQGRQQEQQFKRE

SEQ ID NO: 567 - protein, 15 aa, Synthetic Peptide
QGRQQEQQFKRELRN

SEQ ID NO: 568 - protein, 15 aa, Synthetic Peptide
QQEQQFKRELRNLPQ

SEQ ID NO: 569 - protein, 15 aa, Synthetic Peptide
QQFKRELRNLPQQCG

SEQ ID NO: 570 - protein, 15 aa, Synthetic Peptide
KRELRNLPQQCGLRA

SEQ ID NO: 571 - protein, 15 aa, Synthetic Peptide
LRNLPQQCGLRAPQR

SEQ ID NO: 572 - protein, 15 aa, Synthetic Peptide
LPQQCGLRAPQRCDL

SEQ ID NO: 573 - protein, 15 aa, Synthetic Peptide
QCGLRAPQRCDLEVE

SEQ ID NO: 574 - protein, 15 aa, Synthetic Peptide
LRAPQRCDLEVESGG

SEQ ID NO: 575 - protein, 15 aa, Synthetic Peptide
PQRCDLEVESGGRDR

SEQ ID NO: 576 - protein, 15 aa, Synthetic Peptide
QRCDLEVESGGRDRY

SEQ ID NO: 577 - protein, 15 aa, Synthetic Peptide
RDEDSYGRDPYSPSQ

SEQ ID NO: 578 - protein, 15 aa, Synthetic Peptide
DSYGRDPYSPSQDPY

SEQ ID NO: 579 - protein, 15 aa, Synthetic Peptide
GRDPYSPSQDPYSPS

SEQ ID NO: 580 - protein, 15 aa, Synthetic Peptide
PYSPSQDPYSPSQDP

SEQ ID NO: 581 - protein, 15 aa, Synthetic Peptide
PSQDPYSPSQDPDRR

SEQ ID NO: 582 - protein, 15 aa, Synthetic Peptide
DPYSPSQDPDRRDPY

SEQ ID NO: 583 - protein, 15 aa, Synthetic Peptide
SPSQDPDRRDPYSPS

SEQ ID NO: 584 - protein, 15 aa, Synthetic Peptide
QDPDRRDPYSPSPYD

SEQ ID NO: 585 - protein, 15 aa, Synthetic Peptide
DRRDPYSPSPYDRRG

SEQ ID NO: 586 - protein, 15 aa, Synthetic Peptide
DPYSPSPYDRRGAGS

SEQ ID NO: 587 - protein, 15 aa, Synthetic Peptide
SPSPYDRRGAGSSQH

SEQ ID NO: 588-599 - skipped (12 entries)

SEQ ID NO: 600 - protein, 8 aa, Artificial Sequence
  Synthetic Construct
GYTFNRYD

SEQ ID NO: 601 - protein, 8 aa, Artificial Sequence
  Synthetic Construct
MNPKTGNT

SEQ ID NO: 602 - protein, 8 aa, Artificial Sequence
  Synthetic Construct
ARGVDATH

SEQ ID NO: 603 - protein, 12 aa, Artificial Sequence
  Synthetic Construct
QSVFDSSSNKNY

SEQ ID NO: 604 - protein, 3 aa, Artificial Sequence
  Synthetic Construct
WAS

SEQ ID NO: 605 - protein, 9 aa, Artificial Sequence
  Synthetic Construct
QQYHSTPHT

SEQ ID NO: 606 - protein, 98 aa, Artificial Sequence
  Synthetic Construct
VKVSCKASGYTFNRYDINWVRQATGQGLEWVGWMNPKTGNTGYAQKFQGRVTMTRDTSMSTAYMELNNLTSEDTAVYYCARGVDATHWGQGTRVTVSS

SEQ ID NO: 607 - protein, 109 aa, Artificial Sequence
  Synthetic Construct
TQSPDSLAVSLGERATINCKSSQSVFDSSSNKNYLGWYQQNPGQPPKLLIYWASNRESGVPDRFSGSGSGTDFTLTIDSLQAEDVAIYYCQQYHSTPHTFGQGTKLEIK

SEQ ID NO: 608 - protein, 8 aa, Artificial Sequence
  Synthetic Construct
VKVSCKAS

SEQ ID NO: 609 - protein, 17 aa, Artificial Sequence
  Synthetic Construct
INWVRQATGQGLEWVGW

SEQ ID NO: 610 - protein, 38 aa, Artificial Sequence
  Synthetic Construct
GYAQKFQGRVTMTRDTSMSTAYMELNNLTSEDTAVYYC

SEQ ID NO: 611 - protein, 11 aa, Artificial Sequence
  Synthetic Construct
WGQGTRVTVSS

SEQ ID NO: 612 - protein, 22 aa, Artificial Sequence
  Synthetic Construct
TQSPDSLAVSLGERATINCKSS

SEQ ID NO: 613 - protein, 17 aa, Artificial Sequence
  Synthetic Construct
LGWYQQNPGQPPKLLIY

SEQ ID NO: 614 - protein, 36 aa, Artificial Sequence
  Synthetic Construct
NRESGVPDRFSGSGSGTDFTLTIDSLQAEDVAIYYC

SEQ ID NO: 615 - protein, 10 aa, Artificial Sequence
  Synthetic Construct
FGQGTKLEIK

SEQ ID NO: 616 - protein, 255 aa, Artificial Sequence
  Synthetic Construct
  misc_feature (122)..(122): Xaa can be any naturally occurring amino acid
  misc_feature (192)..(192): Xaa can be any naturally occurring amino acid
VKVSCKASGYTFNRYDINWVRQATGQGLEWVGWMNPKTGNTGYAQKFQGRVTMTRDTSMSTAYMELNNLTSEDTAVYYCARGVDATHWGQGTRVTVSSKGPSVFPLAPSSKSTSGGTAALGXLVKDYFPEPVTVSWNSGALTSGVHTFPAVLQSSGLYSLSSVVTVPSSSLGTQTYICNVNHKPSNTKVDKXVEPKSCDKTHTCPPCPAPELLGGPSVFLFPPKPKDTLMISRTPEVTCVVVDVSHEDPEVKFNW

SEQ ID NO: 617 - protein, 213 aa, Artificial Sequence
  Synthetic Construct
TQSPDSLAVSLGERATINCKSSQSVFDSSSNKNYLGWYQQNPGQPPKLLIYWASNRESGVPDRFSGSGSGTDFTLTIDSLQAEDVAIYYCQQYHSTPHTFGQGTKLEIKAPSVFIFPPSDEQLKSGTASVVCLLNNFYPREAKVQWKVDNALQSGNSQESVTEQDSKDSTYSLSSTLTLSKADYEKHKVYACEVTHQGLSSPVTKSFNRGECK

SEQ ID NO: 618 - DNA, 255 bp, Artificial Sequence
  Synthetic Construct
agtgaaggtctcctgcaaggcttctggatacaccttcaacagatatgatatcaattgggtgcgacaggccactggacaagggcttgagtgggtgggatggatgaacccgaagaccggcaacacaggctatgcacagaagttccagggcagagtcaccatgaccagggacacttccatgagtacagcctacatggagctgaacaacctgacatctgaggacacggccgtatattattgtgcgagaggggtggacgc

SEQ ID NO: 619 - DNA, 255 bp, Artificial Sequence
  Synthetic Construct
acccagtctccagactccctggctgtgtctctgggcgagagggccaccatcaactgcaagtccagccagagtgtttttgacagctccagcaataagaactacttaggttggtaccagcagaacccaggacagcctcctaagttgctcatttactgggcatctaaccgggaatctggggtccctgaccgattcagtggcagcgggtctgggacagatttcactctcaccatcgacagcctgcaggctgaagatgtg

SEQ ID NO: 620 - protein, 8 aa, Artificial Sequence
  Synthetic Construct
GYIFSKFD

SEQ ID NO: 621 - protein, 8 aa, Artificial Sequence
  Synthetic Construct
TNPKSGNA

SEQ ID NO: 622 - protein, 8 aa, Artificial Sequence
  Synthetic Construct
ARGVDNRD

SEQ ID NO: 623 - protein, 12 aa, Artificial Sequence
  Synthetic Construct
QSIFDSSSDTNY

SEQ ID NO: 624 - protein, 3 aa, Artificial Sequence
  Synthetic Construct
WAS

SEQ ID NO: 625 - protein, 9 aa, Artificial Sequence
  Synthetic Construct
HQYYRPPHT

SEQ ID NO: 626 - protein, 115 aa, Artificial Sequence
  Synthetic Construct
  misc_feature (1)..(1): Xaa can be any naturally occurring amino acid
  misc_feature (3)..(3): Xaa can be any naturally occurring amino acid
XVXLVQSGSEVKKPGASVKVSCQASGYIFSKFDINWVRQAPGQGLEWMGWTNPKSGNAGYAPKFLGRVTMTTDTSTNTAYMELSNLRSDDTAVYYCARGVDNRDWGQGTLVTVSS

SEQ ID NO: 627 - protein, 113 aa, Artificial Sequence
  Synthetic Construct
  misc_feature (2)..(4): Xaa can be any naturally occurring amino acid
EXXXTQSPDSLAVSLGERATINCQSSQSIFDSSSDTNYLAWYQQKTGQPPKLLIYWASARESGVPDRFSGGGSGTDFTLTISSLQAEDVAIYFCHQYYRPPHTFGQGTRLEIN

SEQ ID NO: 628 - protein, 25 aa, Artificial Sequence
  Synthetic Construct
  misc_feature (1)..(1): Xaa can be any naturally occurring amino acid
  misc_feature (3)..(3): Xaa can be any naturally occurring amino acid
XVXLVQSGSEVKKPGASVKVSCQAS

SEQ ID NO: 629 - protein, 17 aa, Artificial Sequence
  Synthetic Construct
INWVRQAPGQGLEWMGW

SEQ ID NO: 630 - protein, 38 aa, Artificial Sequence
  Synthetic Construct
GYAPKFLGRVTMTTDTSTNTAYMELSNLRSDDTAVYYC

SEQ ID NO: 631 - protein, 11 aa, Artificial Sequence
  Synthetic Construct
WGQGTLVTVSS

SEQ ID NO: 632 - protein, 26 aa, Artificial Sequence
  Synthetic Construct
  misc_feature (2)..(4): Xaa can be any naturally occurring amino acid
EXXXTQSPDSLAVSLGERATINCQSS

SEQ ID NO: 633 - protein, 17 aa, Artificial Sequence
  Synthetic Construct
LAWYQQKTGQPPKLLIY

SEQ ID NO: 634 - protein, 36 aa, Artificial Sequence
  Synthetic Construct
ARESGVPDRFSGGGSGTDFTLTISSLQAEDVAIYFC

SEQ ID NO: 635 - protein, 10 aa, Artificial Sequence
  Synthetic Construct
FGQGTRLEIN

SEQ ID NO: 636 - protein, 255 aa, Artificial Sequence
  Synthetic Construct
  misc_feature (1)..(1): Xaa can be any naturally occurring amino acid
  misc_feature (3)..(3): Xaa can be any naturally occurring amino acid
  misc_feature (139)..(139): Xaa can be any naturally occurring amino acid
  misc_feature (209)..(209): Xaa can be any naturally occurring amino acid
XVXLVQSGSEVKKPGASVKVSCQASGYIFSKFDINWVRQAPGQGLEWMGWTNPKSGNAGYAPKFLGRVTMTTDTSTNTAYMELSNLRSDDTAVYYCARGVDNRDWGQGTLVTVSSKGPSVFPLAPSSKSTSGGTAALGXLVKDYFPEPVTVSWNSGALTSGVHTFPAVLQSSGLYSLSSVVTVPSSSLGTQTYICNVNHKPSNTKVDKXVEPKSCDKTHTCPPCPAPELLGGPSVFLFPPKPKDTLMISRTPEVT

SEQ ID NO: 637 - protein, 217 aa, Artificial Sequence
  Synthetic Construct
  misc_feature (2)..(4): Xaa can be any naturally occurring amino acid
EXXXTQSPDSLAVSLGERATINCQSSQSIFDSSSDTNYLAWYQQKTGQPPKLLIYWASARESGVPDRFSGGGSGTDFTLTISSLQAEDVAIYFCHQYYRPPHTFGQGTRLEINAPSVFIFPPSDEQLKSGTASVVCLLNNFYPREAKVQWKVDNALQSGNSQESVTEQDSKDSTYSLSSTLTLSKADYEKHKVYACEVTHQGLSSPVTKSFNRGECK

SEQ ID NO: 638 - DNA, 255 bp, Artificial Sequence
  Synthetic Construct
  misc_feature (1)..(1): n is a, c, g, t or u
  misc_feature (7)..(9): n is a, c, g, t or u
naggtgnnnctggtgcagtctgggagtgaggtgaagaagccyggggcctcagtgaaggtctcctgtcaggcctctggatacatcttcagtaaatttgatatcaactgggtgcgacaggcccctggacaaggacttgagtggatgggatggacgaaccctaagagtggtaatgcagggtatgcaccgaaattcctgggcagagtcaccatgaccacggatacctcaacaaacacagcctacatggagctgagcaac

SEQ ID NO: 639 - DNA, 255 bp, Artificial Sequence
  Synthetic Construct
  misc_feature (6)..(11): n is a, c, g, t or u
gaaatnnnnnngacgcagtctccagactccctggctgtgtctctgggcgagagggccaccatcaactgccagtccagccagagtatttttgacagttccagcgataccaactacttagcttggtaccagcagaaaacaggacagcctcctaagttgctcatttactgggcatctgcccgggaatccggggtccctgaccgattcagtggcggcgggtctgggacagatttcactctcaccatcagcagcctgcag

SEQ ID NO: 640 - protein, 8 aa, Artificial Sequence
  Synthetic Construct
GYIFSGFD

SEQ ID NO: 641 - protein, 8 aa, Artificial Sequence
  Synthetic Construct
MNPKSGRT

SEQ ID NO: 642 - protein, 8 aa, Artificial Sequence
  Synthetic Construct
ARGVDNRD

SEQ ID NO: 643 - protein, 12 aa, Artificial Sequence
  Synthetic Construct
QSVFDSSTNTNY

SEQ ID NO: 644 - protein, 3 aa, Artificial Sequence
  Synthetic Construct
WAS

SEQ ID NO: 645 - protein, 9 aa, Artificial Sequence
  Synthetic Construct
HQYHSTPHT

SEQ ID NO: 646 - protein, 115 aa, Artificial Sequence
  Synthetic Construct
  misc_feature (1)..(1): Xaa can be any naturally occurring amino acid
  misc_feature (3)..(3): Xaa can be any naturally occurring amino acid
  misc_feature (15)..(15): Xaa can be any naturally occurring amino acid
XVXLVQSGAELKKPXASVKVSCRGSGYIFSGFDINWVRQATGQGLEWMGWMNPKSGRTGSAQKFQGRVTLTRNMSTNTAYMELNSLMSEDTAVYYCARGVDNRDWGQGTLVTVSS

SEQ ID NO: 647 - protein, 113 aa, Artificial Sequence
  Synthetic Construct
  misc_feature (2)..(3): Xaa can be any naturally occurring amino acid
DXXVTQSPDSLAVPLGERATINCKSSQSVFDSSTNTNYLAWYQQKPGQPPKLLIYWASSRESGVPDRFSGSGSGTDFTLTISSLQTEDVAVYFCHQYHSTPHTFGQGTKLEIS

SEQ ID NO: 648 - protein, 25 aa, Artificial Sequence
  Synthetic Construct
  misc_feature (1)..(1): Xaa can be any naturally occurring amino acid
  misc_feature (3)..(3): Xaa can be any naturally occurring amino acid
  misc_feature (15)..(15): Xaa can be any naturally occurring amino acid
XVXLVQSGAELKKPXASVKVSCRGS

SEQ ID NO: 649 - protein, 17 aa, Artificial Sequence
  Synthetic Construct
INWVRQATGQGLEWMGW

SEQ ID NO: 650 - protein, 38 aa, Artificial Sequence
  Synthetic Construct
GSAQKFQGRVTLTRNMSTNTAYMELNSLMSEDTAVYYC

SEQ ID NO: 651 - protein, 11 aa, Artificial Sequence
  Synthetic Construct
WGQGTLVTVSS

SEQ ID NO: 652 - protein, 26 aa, Artificial Sequence
  Synthetic Construct
  misc_feature (2)..(3): Xaa can be any naturally occurring amino acid
DXXVTQSPDSLAVPLGERATINCKSS

SEQ ID NO: 653 - protein, 17 aa, Artificial Sequence
  Synthetic Construct
LAWYQQKPGQPPKLLIY

SEQ ID NO: 654 - protein, 36 aa, Artificial Sequence
  Synthetic Construct
SRESGVPDRFSGSGSGTDFTLTISSLQTEDVAVYFC

SEQ ID NO: 655 - protein, 10 aa, Artificial Sequence
  Synthetic Construct
FGQGTKLEIS

SEQ ID NO: 656 - protein, 255 aa, Artificial Sequence
  Synthetic Construct
  misc_feature (1)..(1): Xaa can be any naturally occurring amino acid
  misc_feature (3)..(3): Xaa can be any naturally occurring amino acid
  misc_feature (15)..(15): Xaa can be any naturally occurring amino acid
  misc_feature (139)..(139): Xaa can be any naturally occurring amino acid
  misc_feature (209)..(209): Xaa can be any naturally occurring amino acid
XVXLVQSGAELKKPXASVKVSCRGSGYIFSGFDINWVRQATGQGLEWMGWMNPKSGRTGSAQKFQGRVTLTRNMSTNTAYMELNSLMSEDTAVYYCARGVDNRDWGQGTLVTVSSKGPSVFPLAPSSKSTSGGTAALGXLVKDYFPEPVTVSWNSGALTSGVHTFPAVLQSSGLYSLSSVVTVPSSSLGTQTYICNVNHKPSNTKVDKXVEPKSCDKTHTCPPCPAPELLGGPSVFLFPPKPKDTLMISRTPEVT

SEQ ID NO: 657 - protein, 217 aa, Artificial Sequence
  Synthetic Construct
  misc_feature (2)..(3): Xaa can be any naturally occurring amino acid
DXXVTQSPDSLAVPLGERATINCKSSQSVFDSSTNTNYLAWYQQKPGQPPKLLIYWASSRESGVPDRFSGSGSGTDFTLTISSLQTEDVAVYFCHQYHSTPHTFGQGTKLEISAPSVFIFPPSDEQLKSGTASVVCLLNNFYPREAKVQWKVDNALQSGNSQESVTEQDSKDSTYSLSSTLTLSKADYEKHKVYACEVTHQGLSSPVTKSFNRGECK

SEQ ID NO: 658 - DNA, 255 bp, Artificial Sequence
  Synthetic Construct
  misc_feature (3)..(3): n is a, c, g, t or u
  misc_feature (8)..(9): n is a, c, g, t or u
gangtgcnnctggtgcagtctggggctgagttgaagaagcctsgggcctcagtgaaggtctcctgtaggggctctggatacatcttcagcggatttgatatcaattgggtgcgacaggccactggacaagggcttgagtggatggggtggatgaaccctaagagtggtaggacaggctctgcacagaagttccagggcagagtcaccttgaccagaaatatgtccacgaacacagcctacatggagctgaacagc

SEQ ID NO: 659 - DNA, 255 bp, Artificial Sequence
  Synthetic Construct
  misc_feature (6)..(6): n is a, c, g, t or u
  misc_feature (8)..(9): n is a, c, g, t or u
gacatngnngtgacccagtcaccagactccctggctgtgcctctgggcgagagggccaccatcaactgcaagtccagccagagtgtttttgacagctccaccaatacgaattacttagcttggtaccagcagaaaccaggacagcctcctaagctgctcatttattgggcatcttcccgggaatccggggtccctgaccgattcagtggcagcgggtctgggacagatttcactctcaccatcagcagcctgcag

SEQ ID NO: 660 - protein, 8 aa, Artificial Sequence
  Synthetic Construct
DFTFSFYA

SEQ ID NO: 661 - protein, 8 aa, Artificial Sequence
  Synthetic Construct
ISNNGNSQ

SEQ ID NO: 662 - protein, 17 aa, Artificial Sequence
  Synthetic Construct
AKTLDYSEHQFYFGLDV

SEQ ID NO: 663 - protein, 7 aa, Artificial Sequence
  Synthetic Construct
QTISSKY

SEQ ID NO: 664 - protein, 3 aa, Artificial Sequence
  Synthetic Construct
GAS

SEQ ID NO: 665 - protein, 10 aa, Artificial Sequence
  Synthetic Construct
QHYSNSPPYT

SEQ ID NO: 666 - protein, 124 aa, Artificial Sequence
  Synthetic Construct
  misc_feature (3)..(4): Xaa can be any naturally occurring amino acid
QVXXVESGGGVVQPGGSLRLSCAGSDFTFSFYAIHWVRRTPGEGLEWLTVISNNGNSQSYSDSVKGRFTVSRDNSKDTLYLQMNNVRTDDTAVYYCAKTLDYSEHQFYFGLDVWGQGTTVIVSS

SEQ ID NO: 667 - protein, 109 aa, Artificial Sequence
  Synthetic Construct
  misc_feature (3)..(3): Xaa can be any naturally occurring amino acid
RNXETQSPGTLSLSPGERATLSCRTSQTISSKYLAWYQHKPGQPPRLLLYGASRRATGVPDRFSGSGSGTDFTLTISRLEPEDFAVYYCQHYSNSPPYTFGQGTKLDVK

SEQ ID NO: 668 - protein, 25 aa, Artificial Sequence
  Synthetic Construct
  misc_feature (3)..(4): Xaa can be any naturally occurring amino acid
QVXXVESGGGVVQPGGSLRLSCAGS

SEQ ID NO: 669 - protein, 17 aa, Artificial Sequence
  Synthetic Construct
IHWVRRTPGEGLEWLTV

SEQ ID NO: 670 - protein, 38 aa, Artificial Sequence
  Synthetic Construct
SYSDSVKGRFTVSRDNSKDTLYLQMNNVRTDDTAVYYC

SEQ ID NO: 671 - protein, 11 aa, Artificial Sequence
  Synthetic Construct
WGQGTTVIVSS

SEQ ID NO: 672 - protein, 26 aa, Artificial Sequence
  Synthetic Construct
  misc_feature (3)..(3): Xaa can be any naturally occurring amino acid
RNXETQSPGTLSLSPGERATLSCRTS

SEQ ID NO: 673 - protein, 17 aa, Artificial Sequence
  Synthetic Construct
LAWYQHKPGQPPRLLLY

SEQ ID NO: 674 - protein, 36 aa, Artificial Sequence
  Synthetic Construct
RRATGVPDRFSGSGSGTDFTLTISRLEPEDFAVYYC

SEQ ID NO: 675 - protein, 10 aa, Artificial Sequence
  Synthetic Construct
FGQGTKLDVK

SEQ ID NO: 676 - protein, 255 aa, Artificial Sequence
  Synthetic Construct
  misc_feature (3)..(4): Xaa can be any naturally occurring amino acid
  misc_feature (148)..(148): Xaa can be any naturally occurring amino acid
  misc_feature (218)..(218): Xaa can be any naturally occurring amino acid
QVXXVESGGGVVQPGGSLRLSCAGSDFTFSFYAIHWVRRTPGEGLEWLTVISNNGNSQSYSDSVKGRFTVSRDNSKDTLYLQMNNVRTDDTAVYYCAKTLDYSEHQFYFGLDVWGQGTTVIVSSKGPSVFPLAPSSKSTSGGTAALGXLVKDYFPEPVTVSWNSGALTSGVHTFPAVLQSSGLYSLSSVVTVPSSSLGTQTYICNVNHKPSNTKVDKXVEPKSCDKTHTCPPCPAPELLGGPSVFLFPPKPKDTL

SEQ ID NO: 677 - protein, 213 aa, Artificial Sequence
  Synthetic Construct
  misc_feature (3)..(3): Xaa can be any naturally occurring amino acid
RNXETQSPGTLSLSPGERATLSCRTSQTISSKYLAWYQHKPGQPPRLLLYGASRRATGVPDRFSGSGSGTDFTLTISRLEPEDFAVYYCQHYSNSPPYTFGQGTKLDVKAPSVFIFPPSDEQLKSGTASVVCLLNNFYPREAKVQWKVDNALQSGNSQESVTEQDSKDSTYSLSSTLTLSKADYEKHKVYACEVTHQGLSSPVTKSFNRGECK

SEQ ID NO: 678 - DNA, 255 bp, Artificial Sequence
  Synthetic Construct
  misc_feature (7)..(7): n is a, c, g, t or u
  misc_feature (10)..(11): n is a, c, g, t or u
caggtgnccnnggtggagtctgggggaggcgtggtccagccgggggggtccctgcgactctcctgtgcaggctctgattttacttttagtttttacgccatacactgggtccgccggactccaggtgaggggctggagtggctcacagttatctcgaataatggtaatagtcaatcctattcagactccgtgaagggccgattcaccgtctccagagacaattccaaggatacgttgtatctgcaaatgaacaat

SEQ ID NO: 679 - DNA, 255 bp, Artificial Sequence
  Synthetic Construct
  misc_feature (7)..(7): n is a, c, g, t or u
  misc_feature (9)..(9): n is a, c, g, t or u
cgaaatngngagacgcagtctccaggcaccctgtctttgtctccaggggaaagagccaccctctcctgcaggaccagtcagactataagtagtaaatatttagcctggtaccagcataagcctggccagcctcccaggctcctcctctatggtgcatccaggagggccactggcgtcccagacaggttcagtggcagtgggtctgggacagacttcactctcaccatcagcagactggagcctgaagattttgcg

SEQ ID NO: 680 - protein, 8 aa, Artificial Sequence
  Synthetic Construct
GFTFSIFG

SEQ ID NO: 681 - protein, 8 aa, Artificial Sequence
  Synthetic Construct
ISGTGEIT

SEQ ID NO: 682 - protein, 15 aa, Artificial Sequence
  Synthetic Construct
AKERTKYQLAYPFDY

SEQ ID NO: 683 - protein, 6 aa, Artificial Sequence
  Synthetic Construct
QDITTY

SEQ ID NO: 684 - protein, 3 aa, Artificial Sequence
  Synthetic Construct
DAS

SEQ ID NO: 685 - protein, 9 aa, Artificial Sequence
  Synthetic Construct
QQYENFPRT

SEQ ID NO: 686 - protein, 121 aa, Artificial Sequence
  Synthetic Construct
VQLVESGGGLVQPGGSLRLSCTASGFTFSIFGMSWVRQAPGKGLEWVSSISGTGEITKYTDSVKGRFTISRDNSKTTVYLQMKSLRAEDTAFYFCAKERTKYQLAYPFDYWGQGTLVTVSS

SEQ ID NO: 687 - protein, 103 aa, Artificial Sequence
  Synthetic Construct
TQSPSSLSASVGDRVTITCQASQDITTYLSWYQQIPGKAPKLLISDASFLQAGVPSRFSGSGSGTDFTFTITNLQPEDVATYYCQQYENFPRTFGGGTKVEIR

SEQ ID NO: 688 - protein, 24 aa, Artificial Sequence
  Synthetic Construct
VQLVESGGGLVQPGGSLRLSCTAS

SEQ ID NO: 689 - protein, 17 aa, Artificial Sequence
  Synthetic Construct
MSWVRQAPGKGLEWVSS

SEQ ID NO: 690 - protein, 38 aa, Artificial Sequence
  Synthetic Construct
KYTDSVKGRFTISRDNSKTTVYLQMKSLRAEDTAFYFC

SEQ ID NO: 691 - protein, 11 aa, Artificial Sequence
  Synthetic Construct
WGQGTLVTVSS

SEQ ID NO: 692 - protein, 22 aa, Artificial Sequence
  Synthetic Construct
TQSPSSLSASVGDRVTITCQAS

SEQ ID NO: 693 - protein, 17 aa, Artificial Sequence
  Synthetic Construct
LSWYQQIPGKAPKLLIS

SEQ ID NO: 694 - protein, 36 aa, Artificial Sequence
  Synthetic Construct
FLQAGVPSRFSGSGSGTDFTFTITNLQPEDVATYYC

SEQ ID NO: 695 - protein, 10 aa, Artificial Sequence
  Synthetic Construct
FGGGTKVEIR

SEQ ID NO: 696 - protein, 255 aa, Artificial Sequence
  Synthetic Construct
  misc_feature (145)..(145): Xaa can be any naturally occurring amino acid
  misc_feature (215)..(215): Xaa can be any naturally occurring amino acid
VQLVESGGGLVQPGGSLRLSCTASGFTFSIFGMSWVRQAPGKGLEWVSSISGTGEITKYTDSVKGRFTISRDNSKTTVYLQMKSLRAEDTAFYFCAKERTKYQLAYPFDYWGQGTLVTVSSKGPSVFPLAPSSKSTSGGTAALGXLVKDYFPEPVTVSWNSGALTSGVHTFPAVLQSSGLYSLSSVVTVPSSSLGTQTYICNVNHKPSNTKVDKXVEPKSCDKTHTCPPCPAPELLGGPSVFLFPPKPKDTLMIS

SEQ ID NO: 697 - protein, 207 aa, Artificial Sequence
  Synthetic Construct
TQSPSSLSASVGDRVTITCQASQDITTYLSWYQQIPGKAPKLLISDASFLQAGVPSRFSGSGSGTDFTFTITNLQPEDVATYYCQQYENFPRTFGGGTKVEIRAPSVFIFPPSDEQLKSGTASVVCLLNNFYPREAKVQWKVDNALQSGNSQESVTEQDSKDSTYSLSSTLTLSKADYEKHKVYACEVTHQGLSSPVTKSFNRGECK

SEQ ID NO: 698 - DNA, 255 bp, Artificial Sequence
  Synthetic Construct
gtgcagctggtggagtctgggggaggcttggtacagcctggggggtccctgagactctcgtgtactgcctctggcttcacttttagcatctttggcatgagttgggtccgccaggctccagggaaggggctggagtgggtctcaagtatcagtggtactggtgaaattacgaaatacacagactccgtgaagggccggttcaccatctccagagacaattccaagactaccgtgtatctgcagatgaagagcctg

SEQ ID NO: 699 - DNA, 255 bp, Artificial Sequence
  Synthetic Construct
acccagtctccatcctccctgtctgcttctgttggagacagagtcaccatcacttgccaggcgagtcaagacattaccacttatttgagttggtatcagcagataccagggaaagcccctaaactcctgatctccgatgcatcctttttgcaagcaggggtcccttcaagattcagtggaagtgggtctgggacagattttactttcaccatcaccaacctgcagcctgaggatgttgcaacatactactgtcaa

SEQ ID NO: 700 - protein, 8 aa, Artificial Sequence
  Synthetic Construct
GFTFNRFA

SEQ ID NO: 701 - protein, 8 aa, Artificial Sequence
  Synthetic Construct
ISGTGAVT

SEQ ID NO: 702 - protein, 15 aa, Artificial Sequence
  Synthetic Construct
AKDRTPVTNYYGMDV

SEQ ID NO: 703 - protein, 6 aa, Artificial Sequence
  Synthetic Construct
QTIDNY

SEQ ID NO: 704 - protein, 3 aa, Artificial Sequence
  Synthetic Construct
AAS

SEQ ID NO: 705 - protein, 9 aa, Artificial Sequence
  Synthetic Construct
QQTSSTPYT

SEQ ID NO: 706 - protein, 121 aa, Artificial Sequence
  Synthetic Construct
VQLVESGGTLGQPGGSLRLSCTASGFTFNRFAINWVRQAPGKGLEWVAAISGTGAVTYYADSVEGRFSISRENSNNTVFLEMNNLRGEDTAVYFCAKDRTPVTNYYGMDVWGQGTTVTVSS

SEQ ID NO: 707 - protein, 103 aa, Artificial Sequence
  Synthetic Construct
TQSPSSLSASVGDRVIITCRGSQTIDNYLNWYQQKPGKAPRLLISAASSLQGGVPSRFSGSGYGTDFTLTISSLQPEDFATYYCQQTSSTPYTFGQGTKVEIK

SEQ ID NO: 708 - protein, 24 aa, Artificial Sequence
  Synthetic Construct
VQLVESGGTLGQPGGSLRLSCTAS

SEQ ID NO: 709 - protein, 17 aa, Artificial Sequence
  Synthetic Construct
INWVRQAPGKGLEWVAA

SEQ ID NO: 710 - protein, 38 aa, Artificial Sequence
  Synthetic Construct
YYADSVEGRFSISRENSNNTVFLEMNNLRGEDTAVYFC

SEQ ID NO: 711 - protein, 11 aa, Artificial Sequence
  Synthetic Construct
WGQGTTVTVSS

SEQ ID NO: 712 - protein, 22 aa, Artificial Sequence
  Synthetic Construct
TQSPSSLSASVGDRVIITCRGS

SEQ ID NO: 713 - protein, 17 aa, Artificial Sequence
  Synthetic Construct
LNWYQQKPGKAPRLLIS

SEQ ID NO: 714 - protein, 36 aa, Artificial Sequence
  Synthetic Construct
SLQGGVPSRFSGSGYGTDFTLTISSLQPEDFATYYC

SEQ ID NO: 715 - protein, 10 aa, Artificial Sequence
  Synthetic Construct
FGQGTKVEIK

SEQ ID NO: 716 - protein, 255 aa, Artificial Sequence
  Synthetic Construct
  misc_feature (145)..(145): Xaa can be any naturally occurring amino acid
  misc_feature (215)..(215): Xaa can be any naturally occurring amino acid
VQLVESGGTLGQPGGSLRLSCTASGFTFNRFAINWVRQAPGKGLEWVAAISGTGAVTYYADSVEGRFSISRENSNNTVFLEMNNLRGEDTAVYFCAKDRTPVTNYYGMDVWGQGTTVTVSSKGPSVFPLAPSSKSTSGGTAALGXLVKDYFPEPVTVSWNSGALTSGVHTFPAVLQSSGLYSLSSVVTVPSSSLGTQTYICNVNHKPSNTKVDKXVEPKSCDKTHTCPPCPAPELLGGPSVFLFPPKPKDTLMIS

SEQ ID NO: 717 - protein, 207 aa, Artificial Sequence
  Synthetic Construct
TQSPSSLSASVGDRVIITCRGSQTIDNYLNWYQQKPGKAPRLLISAASSLQGGVPSRFSGSGYGTDFTLTISSLQPEDFATYYCQQTSSTPYTFGQGTKVEIKAPSVFIFPPSDEQLKSGTASVVCLLNNFYPREAKVQWKVDNALQSGNSQESVTEQDSKDSTYSLSSTLTLSKADYEKHKVYACEVTHQGLSSPVTKSFNRGECK

SEQ ID NO: 718 - DNA, 255 bp, Artificial Sequence
  Synthetic Construct
gtgcagctggtggagtctgggggaaccctgggacagccgggggggtccctgagactctcctgtacagcctctggattcacctttaatagatttgccatcaactgggtccgccaggctccagggaaggggctggaatgggtcgccgctattagtggcactggtgctgtcacatactacgcagactccgtggagggtcggttctccatctccagagagaattccaacaacacggtttttctggaaatgaacaacctg

SEQ ID NO: 719 - DNA, 255 bp, Artificial Sequence
  Synthetic Construct
agacccagtctccatcgtccctgtctgcatctgtgggagacagagtcatcatcacttgccggggaagtcagaccattgacaattatttaaattggtatcagcagaaacctgggaaagcccccaggctccttatctctgcggcatccagcttgcaagggggggtcccttcaaggttcagtggcagtggatatgggacggatttcaccctcaccatcagcagtctgcaacctgaagattttgcaacttactactgtc

SEQ ID NO: 720 - protein, 6 aa, Artificial Sequence
  Synthetic Construct
QTIDNY

SEQ ID NO: 721 - protein, 3 aa, Artificial Sequence
  Synthetic Construct
GAF

SEQ ID NO: 722 - protein, 9 aa, Artificial Sequence
  Synthetic Construct
QQTYSTPYT

SEQ ID NO: 723 - protein, 119 aa, Artificial Sequence
  Synthetic Construct
LVESGGNLGQPGGSLRLSCAASGFPFEKFAINWVRQAPGKGLEWVSAISGTGAVTYYADSVEGRFSISRDNSKNTVFLEMNSLRVEDTAVYFCAKDRTPVTNYYGMDVWGQGTTVTVSS

SEQ ID NO: 724 - protein, 102 aa, Artificial Sequence
  Synthetic Construct
QSPASLSASVGDRVTITCRGSQTIDNYLNWYQHKPGKAPKLLIYGAFSLQGGVPSRFSGSGYGTDFTLTISSLQPEDFATYYCQQTYSTPYTFGQGTKLETN

SEQ ID NO: 725 - protein, 22 aa, Artificial Sequence
  Synthetic Construct
LVESGGNLGQPGGSLRLSCAAS

SEQ ID NO: 726 - protein, 17 aa, Artificial Sequence
  Synthetic Construct
INWVRQAPGKGLEWVSA

SEQ ID NO: 727 - protein, 38 aa, Artificial Sequence
  Synthetic Construct
YYADSVEGRFSISRDNSKNTVFLEMNSLRVEDTAVYFC

SEQ ID NO: 728 - protein, 11 aa, Artificial Sequence
  Synthetic Construct
WGQGTTVTVSS

SEQ ID NO: 729 - protein, 21 aa, Artificial Sequence
  Synthetic Construct
QSPASLSASVGDRVTITCRGS

SEQ ID NO: 730 - protein, 17 aa, Artificial Sequence
  Synthetic Construct
LNWYQHKPGKAPKLLIY

SEQ ID NO: 731 - protein, 36 aa, Artificial Sequence; identical to SEQ ID NO: 714
  Synthetic Construct

SEQ ID NO: 732 - protein, 10 aa, Artificial Sequence
  Synthetic Construct
FGQGTKLETN

SEQ ID NO: 733 - protein, 255 aa, Artificial Sequence
  Synthetic Construct
  misc_feature (143)..(143): Xaa can be any naturally occurring amino acid
  misc_feature (213)..(213): Xaa can be any naturally occurring amino acid
LVESGGNLGQPGGSLRLSCAASGFPFEKFAINWVRQAPGKGLEWVSAISGTGAVTYYADSVEGRFSISRDNSKNTVFLEMNSLRVEDTAVYFCAKDRTPVTNYYGMDVWGQGTTVTVSSKGPSVFPLAPSSKSTSGGTAALGXLVKDYFPEPVTVSWNSGALTSGVHTFPAVLQSSGLYSLSSVVTVPSSSLGTQTYICNVNHKPSNTKVDKXVEPKSCDKTHTCPPCPAPELLGGPSVFLFPPKPKDTLMISRT

SEQ ID NO: 734 - protein, 206 aa, Artificial Sequence
  Synthetic Construct
QSPASLSASVGDRVTITCRGSQTIDNYLNWYQHKPGKAPKLLIYGAFSLQGGVPSRFSGSGYGTDFTLTISSLQPEDFATYYCQQTYSTPYTFGQGTKLETNAPSVFIFPPSDEQLKSGTASVVCLLNNFYPREAKVQWKVDNALQSGNSQESVTEQDSKDSTYSLSSTLTLSKADYEKHKVYACEVTHQGLSSPVTKSFNRGECK

SEQ ID NO: 735 - DNA, 255 bp, Artificial Sequence
  Synthetic Construct
agctggtggagtctgggggaaacttgggacagccgggggggtccctgagactgtcctgtgcagcctctggattcccctttgagaagtttgccatcaactgggtccgccaggctccagggaaggggctggagtgggtctcggctattagtggtactggtgctgtcacatactacgcagactccgtggagggccggttctccatctccagagacaattccaagaacacggtgtttctggagatgaacagcctgagag

SEQ ID NO: 736 - DNA, 255 bp, Artificial Sequence
  Synthetic Construct
cccagtcgccagcgtccctgtccgcatctgtaggagacagagtcaccatcacttgccggggaagtcagaccattgacaattatttaaattggtatcagcacaaacctgggaaagcccctaaactcctgatctatggggctttcagtttgcagggtggggtcccatcaaggttcagtggcagtggatatgggacagatttcactctcaccatcagcagtctgcaacctgaagactttgcaacttactactgtcagc

SEQ ID NO: 737 - protein, 6 aa, Artificial Sequence
  Synthetic Construct
QTIDNY

SEQ ID NO: 738 - protein, 3 aa, Artificial Sequence
  Synthetic Construct
GAF

SEQ ID NO: 739 - protein, 9 aa, Artificial Sequence
  Synthetic Construct
QQTYSTPYT

SEQ ID NO: 740 - protein, 8 aa, Artificial Sequence
  Synthetic Construct
GFNFDDYT

SEQ ID NO: 741 - protein, 8 aa, Artificial Sequence
  Synthetic Construct
IKWNSNNI

SEQ ID NO: 742 - protein, 11 aa, Artificial Sequence
  Synthetic Construct
VKDNGFRGFHI

SEQ ID NO: 743 - protein, 11 aa, Artificial Sequence
  Synthetic Construct
QSLLHRNGYNY

SEQ ID NO: 744 - protein, 3 aa, Artificial Sequence
  Synthetic Construct
LGS

SEQ ID NO: 745 - protein, 8 aa, Artificial Sequence
  Synthetic Construct
MQALESWT

SEQ ID NO: 746 - protein, 117 aa, Artificial Sequence
  Synthetic Construct
  misc_feature (2)..(3): Xaa can be any naturally occurring amino acid
VXXVESGGGFVQPGGSLRLSCVASGFNFDDYTMHWVRQVAGTGLEWVSSIKWNSNNIDYADSVKGRFTISRDNAKNSLFLQMDSLRVEDTAFYYCVKDNGFRGFHIWGQGTMVTVSS

SEQ ID NO: 747 - protein, 107 aa, Artificial Sequence
  Synthetic Construct
TQSPLSLSVTPGESASISCRSSQSLLHRNGYNYLDWYLQKPGQSPQLLIHLGSKRASGVPDRFSGSGSGTDFTLKISRVEAEDVGVYYCMQALESWTFGQGTKVEIK

SEQ ID NO: 748 - protein, 24 aa, Artificial Sequence
  Synthetic Construct
  misc_feature (2)..(3): Xaa can be any naturally occurring amino acid
VXXVESGGGFVQPGGSLRLSCVAS

SEQ ID NO: 749 - protein, 17 aa, Artificial Sequence
  Synthetic Construct
MHWVRQVAGTGLEWVSS

SEQ ID NO: 750 - protein, 38 aa, Artificial Sequence
  Synthetic Construct
DYADSVKGRFTISRDNAKNSLFLQMDSLRVEDTAFYYC

SEQ ID NO: 751 - protein, 11 aa, Artificial Sequence
  Synthetic Construct
WGQGTMVTVSS

SEQ ID NO: 752 - protein, 22 aa, Artificial Sequence
  Synthetic Construct
TQSPLSLSVTPGESASISCRSS

SEQ ID NO: 753 - protein, 17 aa, Artificial Sequence
  Synthetic Construct
LDWYLQKPGQSPQLLIH

SEQ ID NO: 754 - protein, 36 aa, Artificial Sequence; identical to SEQ ID NO: 195
  Synthetic Construct

SEQ ID NO: 755 - protein, 10 aa, Artificial Sequence
  Synthetic Construct
FGQGTKVEIK

SEQ ID NO: 756 - protein, 255 aa, Artificial Sequence
  Synthetic Construct
  misc_feature (2)..(3): Xaa can be any naturally occurring amino acid
  misc_feature (141)..(141): Xaa can be any naturally occurring amino acid
  misc_feature (211)..(211): Xaa can be any naturally occurring amino acid
VXXVESGGGFVQPGGSLRLSCVASGFNFDDYTMHWVRQVAGTGLEWVSSIKWNSNNIDYADSVKGRFTISRDNAKNSLFLQMDSLRVEDTAFYYCVKDNGFRGFHIWGQGTMVTVSSKGPSVFPLAPSSKSTSGGTAALGXLVKDYFPEPVTVSWNSGALTSGVHTFPAVLQSSGLYSLSSVVTVPSSSLGTQTYICNVNHKPSNTKVDKXVEPKSCDKTHTCPPCPAPELLGGPSVFLFPPKPKDTLMISRTPE

SEQ ID NO: 757 - protein, 211 aa, Artificial Sequence
  Synthetic Construct
TQSPLSLSVTPGESASISCRSSQSLLHRNGYNYLDWYLQKPGQSPQLLIHLGSKRASGVPDRFSGSGSGTDFTLKISRVEAEDVGVYYCMQALESWTFGQGTKVEIKAPSVFIFPPSDEQLKSGTASVVCLLNNFYPREAKVQWKVDNALQSGNSQESVTEQDSKDSTYSLSSTLTLSKADYEKHKVYACEVTHQGLSSPVTKSFNRGECK

SEQ ID NO: 758 - DNA, 255 bp, Artificial Sequence
  Synthetic Construct
  misc_feature (6)..(6): n is a, c, g, t or u
  misc_feature (10)..(10): n is a, c, g, t or u
aggtgncagnggtggagtctgggggaggcttcgtacagcctggcgggtccctgagactctcctgtgtagcctctggattcaactttgatgattataccatgcactgggtccgacaagttgcagggacgggcctggagtgggtctcaagtattaaatggaactctaataacatagactatgcggactctgtgaagggccggttcaccatctccagagacaacgccaagaattccctgtttctgcagatggatagtc

SEQ ID NO: 759 - DNA, 255 bp, Artificial Sequence
  Synthetic Construct
gactcagtctccactctccctgtccgtcacccctggagagtcggcctccatctcctgcaggtctagtcagagcctcctgcatcgtaatggatacaactatttggattggtacctgcagaagccagggcagtctccacaactcctgatccatttgggttctaagcgggcctccggggtccctgacaggttcagtggcagtggatcaggcacagattttacactgaaaatcagcagagtggaggctgaggatgttgg

SEQ ID NO: 760 - protein, 8 aa, Artificial Sequence
  Synthetic Construct
GDSISSYY

SEQ ID NO: 761 - protein, 7 aa, Artificial Sequence
  Synthetic Construct
IFTSGST

SEQ ID NO: 762 - protein, 20 aa, Artificial Sequence
  Synthetic Construct
AKHTRDFWSDDSRVHWYFNL

SEQ ID NO: 763 - protein, 7 aa, Artificial Sequence
  Synthetic Construct
QSVSNNF

SEQ ID NO: 764 - protein, 3 aa, Artificial Sequence
  Synthetic Construct
GAS

SEQ ID NO: 765 - protein, 9 aa, Artificial Sequence
  Synthetic Construct
QQYDSSPYT

SEQ ID NO: 766 - protein, 121 aa, Artificial Sequence
  Synthetic Construct
ESGPGLVKPSETLSLTCTVSGDSISSYYWSWIRQPAGKGLEWIGRIFTSGSTNINPSLKSRVTMSVDTSKNQFSLQLGSVTAADTAIYYCAKHTRDFWSDDSRVHWYFNLWGRGTLVTVSS

SEQ ID NO: 767 - protein, 103 aa, Artificial Sequence
  Synthetic Construct
QSPGTLSLSPGERATLSCRASQSVSNNFLAWYQQQPGQAPSLLIYGASTRATGIPDRFSGSGSGTDFTLTISRLEPEDFAVYFCQQYDSSPYTFGQGTKLEIK

SEQ ID NO: 768 - protein, 20 aa, Artificial Sequence
  Synthetic Construct
ESGPGLVKPSETLSLTCTVS

SEQ ID NO: 769 - protein, 17 aa, Artificial Sequence
  Synthetic Construct
WSWIRQPAGKGLEWIGR

SEQ ID NO: 770 - protein, 38 aa, Artificial Sequence
  Synthetic Construct
NINPSLKSRVTMSVDTSKNQFSLQLGSVTAADTAIYYC

SEQ ID NO: 771 - protein, 11 aa, Artificial Sequence
  Synthetic Construct
WGRGTLVTVSS

SEQ ID NO: 772 - protein, 21 aa, Artificial Sequence
  Synthetic Construct
QSPGTLSLSPGERATLSCRAS

SEQ ID NO: 773 - protein, 17 aa, Artificial Sequence
  Synthetic Construct
LAWYQQQPGQAPSLLIY

SEQ ID NO: 774 - protein, 36 aa, Artificial Sequence
  Synthetic Construct
TRATGIPDRFSGSGSGTDFTLTISRLEPEDFAVYFC

SEQ ID NO: 775 - protein, 10 aa, Artificial Sequence
  Synthetic Construct
FGQGTKLEIK

SEQ ID NO: 776 - protein, 255 aa, Artificial Sequence
  Synthetic Construct
  misc_feature (145)..(145): Xaa can be any naturally occurring amino acid
  misc_feature (215)..(215): Xaa can be any naturally occurring amino acid
ESGPGLVKPSETLSLTCTVSGDSISSYYWSWIRQPAGKGLEWIGRIFTSGSTNINPSLKSRVTMSVDTSKNQFSLQLGSVTAADTAIYYCAKHTRDFWSDDSRVHWYFNLWGRGTLVTVSSKGPSVFPLAPSSKSTSGGTAALGXLVKDYFPEPVTVSWNSGALTSGVHTFPAVLQSSGLYSLSSVVTVPSSSLGTQTYICNVNHKPSNTKVDKXVEPKSCDKTHTCPPCPAPELLGGPSVFLFPPKPKDTLMIS

SEQ ID NO: 777 - protein, 207 aa, Artificial Sequence
  Synthetic Construct
QSPGTLSLSPGERATLSCRASQSVSNNFLAWYQQQPGQAPSLLIYGASTRATGIPDRFSGSGSGTDFTLTISRLEPEDFAVYFCQQYDSSPYTFGQGTKLEIKAPSVFIFPPSDEQLKSGTASVVCLLNNFYPREAKVQWKVDNALQSGNSQESVTEQDSKDSTYSLSSTLTLSKADYEKHKVYACEVTHQGLSSPVTKSFNRGECK

SEQ ID NO: 778 - DNA, 255 bp, Artificial Sequence
  Synthetic Construct
ggagtcgggcccaggactggtgaagccttcggagaccctgtccctcacctgcactgtctctggtgactccatcagtagttattattggagctggatccggcagcccgccgggaagggactggagtggatcgggcgtatcttcaccagtgggagcaccaacatcaacccctccctcaagagtcgagtcaccatgtcagtagacacgtccaaaaatcagttctccctgcagctgggttcggtgaccgccgcggacac

SEQ ID NO: 779 - DNA, 255 bp, Artificial Sequence
  Synthetic Construct
cagtctccaggcaccctgtctttgtctccaggggaaagagccaccctctcctgcagggccagtcagagtgttagcaacaacttcttagcctggtaccagcagcaacctggccaggctcccagtctcctcatctatggtgcttccactagggccactggcatcccagacaggttcagtggcagtgggtctgggacagacttcactctcaccatcagcagactggagcctgaagattttgcagtgtatttctgtcag

SEQ ID NO: 780 - protein, 8 aa, Artificial Sequence
  Synthetic Construct
GYTFTTYA

SEQ ID NO: 781 - protein, 8 aa, Artificial Sequence
  Synthetic Construct
INAGNGNP

SEQ ID NO: 782 - protein, 14 aa, Artificial Sequence
  Synthetic Construct
ARDAAGTRGNWLDP

SEQ ID NO: 783 - protein, 12 aa, Artificial Sequence
  Synthetic Construct
QSVLYSSNNKNY

SEQ ID NO: 784 - protein, 3 aa, Artificial Sequence
  Synthetic Construct
WAS

SEQ ID NO: 785 - protein, 9 aa, Artificial Sequence
  Synthetic Construct
QQYYSTPLT

SEQ ID NO: 786 - protein, 116 aa, Artificial Sequence
  Synthetic Construct
QSGAEVKKPGASVKISCKASGYTFTTYAMHWVRQAPGQRLEWMGGINAGNGNPKYSEKFQDRVTITRDTSATTAYMELSSLRSEDTAVYYCARDAAGTRGNWLDPWGQGTLVTVSS

SEQ ID NO: 787 - protein, 108 aa, Artificial Sequence
  Synthetic Construct
QSPDSLAVSLGERATINCKSSQSVLYSSNNKNYLAWYQQKPGQPPKLLIYWASTRESGVPDRFSGSGSGTDFTLTISSLQAEDVAVYYCQQYYSTPLTFGGGTKVEIK

SEQ ID NO: 788 - protein, 20 aa, Artificial Sequence
  Synthetic Construct
QSGAEVKKPGASVKISCKAS

SEQ ID NO: 789 - protein, 17 aa, Artificial Sequence
  Synthetic Construct
MHWVRQAPGQRLEWMGG

SEQ ID NO: 790 - protein, 38 aa, Artificial Sequence
  Synthetic Construct
KYSEKFQDRVTITRDTSATTAYMELSSLRSEDTAVYYC

SEQ ID NO: 791 - protein, 11 aa, Artificial Sequence
  Synthetic Construct
WGQGTLVTVSS

SEQ ID NO: 792 - protein, 21 aa, Artificial Sequence
  Synthetic Construct
QSPDSLAVSLGERATINCKSS

SEQ ID NO: 793 - protein, 17 aa, Artificial Sequence
  Synthetic Construct
LAWYQQKPGQPPKLLIY

SEQ ID NO: 794 - protein, 36 aa, Artificial Sequence
  Synthetic Construct
TRESGVPDRFSGSGSGTDFTLTISSLQAEDVAVYYC

SEQ ID NO: 795 - protein, 10 aa, Artificial Sequence
  Synthetic Construct
FGGGTKVEIK

SEQ ID NO: 796 - protein, 255 aa, Artificial Sequence
  Synthetic Construct
  misc_feature (140)..(140): Xaa can be any naturally occurring amino acid
  misc_feature (210)..(210): Xaa can be any naturally occurring amino acid
QSGAEVKKPGASVKISCKASGYTFTTYAMHWVRQAPGQRLEWMGGINAGNGNPKYSEKFQDRVTITRDTSATTAYMELSSLRSEDTAVYYCARDAAGTRGNWLDPWGQGTLVTVSSKGPSVFPLAPSSKSTSGGTAALGXLVKDYFPEPVTVSWNSGALTSGVHTFPAVLQSSGLYSLSSVVTVPSSSLGTQTYICNVNHKPSNTKVDKXVEPKSCDKTHTCPPCPAPELLGGPSVFLFPPKPKDTLMISRTPEV

SEQ ID NO: 797 - protein, 212 aa, Artificial Sequence
  Synthetic Construct
QSPDSLAVSLGERATINCKSSQSVLYSSNNKNYLAWYQQKPGQPPKLLIYWASTRESGVPDRFSGSGSGTDFTLTISSLQAEDVAVYYCQQYYSTPLTFGGGTKVEIKAPSVFIFPPSDEQLKSGTASVVCLLNNFYPREAKVQWKVDNALQSGNSQESVTEQDSKDSTYSLSSTLTLSKADYEKHKVYACEVTHQGLSSPVTKSFNRGECK

SEQ ID NO: 798 - DNA, 255 bp, Artificial Sequence
  Synthetic Construct
gcagtccggggctgaggtgaagaagcctggggcctcagtgaagatttcctgcaaggcttctggatacaccttcactacttatgctatgcattgggtgcgccaggcccccggacaaaggcttgagtggatgggagggatcaacgctggcaatggtaatccaaaatattcagagaagttccaggacagagtcaccattaccagggacacatccgcgaccacagcctacatggagctgagcagcctgagatctgagga

SEQ ID NO: 799 - DNA, 255 bp, Artificial Sequence
  Synthetic Construct
ccagtctccagactccctggctgtgtctctgggcgagagggccaccatcaactgcaagtccagccagagtgttttatacagctccaacaataagaactacttagcttggtaccagcagaaaccaggacagcctcctaagctgctcatttactgggcatctactcgggaatccggggtccctgaccgattcagtggcagcgggtctgggacagatttcactctcaccatcagcagcctgcaggctgaagatgtggc

SEQ ID NO: 800 - protein, 9 aa, Artificial Sequence
  Synthetic Construct
GVSISTVNW

SEQ ID NO: 801 - protein, 7 aa, Artificial Sequence
  Synthetic Construct
IFHSGSI

SEQ ID NO: 802 - protein, 13 aa, Artificial Sequence
  Synthetic Construct
ARGTLVFHYGLDV

SEQ ID NO: 803 - protein, 6 aa, Artificial Sequence
  Synthetic Construct
QSISNY

SEQ ID NO: 804 - protein, 3 aa, Artificial Sequence
  Synthetic Construct
AAS

SEQ ID NO: 805 - protein, 10 aa, Artificial Sequence
  Synthetic Construct
QQSYNTPPRT

SEQ ID NO: 806 - protein, 114 aa, Artificial Sequence
  Synthetic Construct
SGPGLVKPSGTLSLTCAVSGVSISTVNWWSWVRQTPGKGLEWIGEIFHSGSINYNPSLKSRVTISLDKSKNQFSLKVTSVTAADTAVYFCARGTLVFHYGLDVWGQGTTVTVSS

SEQ ID NO: 807 - protein, 103 aa, Artificial Sequence
  Synthetic Construct
QSPSSLSASVGDRVTITCRASQSISNYLNWYQQKLGRAPKLLIYAASSLQRGVPSRFSGSGSGTDFTLTISSLQPEDFATYYCQQSYNTPPRTFGGGTKVEIK

SEQ ID NO: 808 - protein, 19 aa, Artificial Sequence
  Synthetic Construct
SGPGLVKPSGTLSLTCAVS

SEQ ID NO: 809 - protein, 17 aa, Artificial Sequence
  Synthetic Construct
WSWVRQTPGKGLEWIGE

SEQ ID NO: 810 - protein, 38 aa, Artificial Sequence
  Synthetic Construct
NYNPSLKSRVTISLDKSKNQFSLKVTSVTAADTAVYFC

SEQ ID NO: 811 - protein, 11 aa, Artificial Sequence
  Synthetic Construct
WGQGTTVTVSS

SEQ ID NO: 812 - protein, 21 aa, Artificial Sequence
  Synthetic Construct
QSPSSLSASVGDRVTITCRAS

SEQ ID NO: 813 - protein, 17 aa, Artificial Sequence
  Synthetic Construct
LNWYQQKLGRAPKLLIY

SEQ ID NO: 814 - protein, 36 aa, Artificial Sequence
  Synthetic Construct
SLQRGVPSRFSGSGSGTDFTLTISSLQPEDFATYYC

SEQ ID NO: 815 - protein, 10 aa, Artificial Sequence
  Synthetic Construct
FGGGTKVEIK

SEQ ID NO: 816 - protein, 255 aa, Artificial Sequence
  Synthetic Construct
  misc_feature (138)..(138): Xaa can be any naturally occurring amino acid
  misc_feature (208)..(208): Xaa can be any naturally occurring amino acid
SGPGLVKPSGTLSLTCAVSGVSISTVNWWSWVRQTPGKGLEWIGEIFHSGSINYNPSLKSRVTISLDKSKNQFSLKVTSVTAADTAVYFCARGTLVFHYGLDVWGQGTTVTVSSKGPSVFPLAPSSKSTSGGTAALGXLVKDYFPEPVTVSWNSGALTSGVHTFPAVLQSSGLYSLSSVVTVPSSSLGTQTYICNVNHKPSNTKVDKXVEPKSCDKTHTCPPCPAPELLGGPSVFLFPPKPKDTLMISRTPEVTC

SEQ ID NO: 817 - protein, 207 aa, Artificial Sequence
  Synthetic Construct
QSPSSLSASVGDRVTITCRASQSISNYLNWYQQKLGRAPKLLIYAASSLQRGVPSRFSGSGSGTDFTLTISSLQPEDFATYYCQQSYNTPPRTFGGGTKVEIKAPSVFIFPPSDEQLKSGTASVVCLLNNFYPREAKVQWKVDNALQSGNSQESVTEQDSKDSTYSLSSTLTLSKADYEKHKVYACEVTHQGLSSPVTKSFNRGECK

SEQ ID NO: 818 - DNA, 255 bp, Artificial Sequence
  Synthetic Construct
gtcgggcccaggactggtgaagccttcggggaccctgtccctcacctgcgctgtctctggtgtctccatcagtactgtaaactggtggagttgggtccgccagaccccagggaaggggctggagtggattggggaaatctttcatagtgggagcatcaactacaacccgtccctcaagagtcgagtcaccatatcacttgacaagtccaagaaccagttctccctgaaggtgacctctgtgaccgccgcggacac

SEQ ID NO: 819 - DNA, 255 bp, Artificial Sequence
  Synthetic Construct
ccagtctccatcctccctgtctgcatctgtaggagacagagtcaccatcacttgccgggcaagtcagagcatcagcaactatttaaattggtatcagcagaaattagggagagcccctaagctcctgatctatgctgcatccagtttgcaaagaggggtcccatcaaggttcagtggcagtggatctgggacagatttcactctcaccatcagcagtctgcaacctgaagattttgcgacttactactgtcagca

SEQ ID NO: 820 - protein, 10 aa, Artificial Sequence
  Synthetic Construct
GGSISSNSYY

SEQ ID NO: 821 - protein, 7 aa, Artificial Sequence
  Synthetic Construct
IYYSGST

SEQ ID NO: 822 - protein, 13 aa, Artificial Sequence
  Synthetic Construct
ARHVCFDDDYFDY

SEQ ID NO: 823 - protein, 6 aa, Artificial Sequence
  Synthetic Construct
QSISNY

SEQ ID NO: 824 - protein, 3 aa, Artificial Sequence
  Synthetic Construct
AAS

SEQ ID NO: 825 - protein, 9 aa, Artificial Sequence
  Synthetic Construct
QHSYVTPYT

SEQ ID NO: 826 - protein, 120 aa, Artificial Sequence
  Synthetic Construct
VQLQESGPGLVKPSETLSLTCTVSGGSISSNSYYWGWIRQPPGKGLEWIGSIYYSGSTYYNPSLKSRVTISVDTSKNQFSLKLSSVTAADTAVYYCARHVCFDDDYFDYWGQGTLVTVSS

SEQ ID NO: 827 - protein, 102 aa, Artificial Sequence
  Synthetic Construct
QSPSSLSASVGDRVTITCRTSQSISNYLNWYQQKPGKAPKLLIYAASSLQSGVPSRFSGSGSGTDFTLTISSLHPEDFATYFCQHSYVTPYTFGQGTKLEIK

SEQ ID NO: 828 - protein, 24 aa, Artificial Sequence
  Synthetic Construct
VQLQESGPGLVKPSETLSLTCTVS

SEQ ID NO: 829 - protein, 17 aa, Artificial Sequence
  Synthetic Construct
WGWIRQPPGKGLEWIGS

SEQ ID NO: 830 - protein, 38 aa, Artificial Sequence
  Synthetic Construct
YYNPSLKSRVTISVDTSKNQFSLKLSSVTAADTAVYYC

SEQ ID NO: 831 - protein, 11 aa, Artificial Sequence
  Synthetic Construct
WGQGTLVTVSS

SEQ ID NO: 832 - protein, 21 aa, Artificial Sequence
  Synthetic Construct
QSPSSLSASVGDRVTITCRTS

SEQ ID NO: 833 - protein, 17 aa, Artificial Sequence
  Synthetic Construct
LNWYQQKPGKAPKLLIY

SEQ ID NO: 834 - protein, 36 aa, Artificial Sequence
  Synthetic Construct
SLQSGVPSRFSGSGSGTDFTLTISSLHPEDFATYFC

SEQ ID NO: 835 - protein, 10 aa, Artificial Sequence
  Synthetic Construct
FGQGTKLEIK

SEQ ID NO: 836 - protein, 255 aa, Artificial Sequence
  Synthetic Construct
  misc_feature (144)..(144): Xaa can be any naturally occurring amino acid
  misc_feature (214)..(214): Xaa can be any naturally occurring amino acid
VQLQESGPGLVKPSETLSLTCTVSGGSISSNSYYWGWIRQPPGKGLEWIGSIYYSGSTYYNPSLKSRVTISVDTSKNQFSLKLSSVTAADTAVYYCARHVCFDDDYFDYWGQGTLVTVSSKGPSVFPLAPSSKSTSGGTAALGXLVKDYFPEPVTVSWNSGALTSGVHTFPAVLQSSGLYSLSSVVTVPSSSLGTQTYICNVNHKPSNTKVDKXVEPKSCDKTHTCPPCPAPELLGGPSVFLFPPKPKDTLMISR

SEQ ID NO: 837 - protein, 206 aa, Artificial Sequence
  Synthetic Construct
QSPSSLSASVGDRVTITCRTSQSISNYLNWYQQKPGKAPKLLIYAASSLQSGVPSRFSGSGSGTDFTLTISSLHPEDFATYFCQHSYVTPYTFGQGTKLEIKAPSVFIFPPSDEQLKSGTASVVCLLNNFYPREAKVQWKVDNALQSGNSQESVTEQDSKDSTYSLSSTLTLSKADYEKHKVYACEVTHQGLSSPVTKSFNRGECK

SEQ ID NO: 838 - DNA, 255 bp, Artificial Sequence
  Synthetic Construct
ggtgcagctgcaggagtcgggcccaggactggtgaagccttcggagaccctgtccctcacctgcactgtctctggtggctccatcagcagtaatagttactactggggctggatccgccagcccccagggaaggggctggagtggattgggagtatctattatagtgggagcacctactacaacccgtccctcaagagtcgagtcaccatatccgtagacacgtccaagaaccagttctccctgaagctgagctc

SEQ ID NO: 839 - DNA, 255 bp, Artificial Sequence
  Synthetic Construct
ccagtctccatcctccctgtctgcatctgtaggagacagagtcaccatcacttgccggacaagtcagagcattagcaactatttaaattggtatcagcagaaaccagggaaagcccctaagctcctgatctatgctgcatccagtttgcaaagtggggtcccatcaaggttcagtggcagtggatctgggacagatttcactctcaccatcagcagtctgcaccctgaagattttgcaacttacttctgtcaaca

SEQ ID NO: 840 - protein, 8 aa, Artificial Sequence
  Synthetic Construct
GYTFTRYD

SEQ ID NO: 841 - protein, 8 aa, Artificial Sequence
  Synthetic Construct
MNPKSGET

SEQ ID NO: 842 - protein, 8 aa, Artificial Sequence
  Synthetic Construct
TRGVDSGV

SEQ ID NO: 843 - protein, 12 aa, Artificial Sequence
  Synthetic Construct
QSVLDSSNNKKF

SEQ ID NO: 844 - protein, 3 aa, Artificial Sequence
  Synthetic Construct
WAS

SEQ ID NO: 845 - protein, 9 aa, Artificial Sequence
  Synthetic Construct
QQYYSPPHT

SEQ ID NO: 846 - protein, 112 aa, Artificial Sequence
  Synthetic Construct
LVQSGAEVKKPGASVKVSCKASGYTFTRYDINWVRQATGQGLEWMGWMNPKSGETGYAQKFHGRVIMSWNTSISTAYMELSSLRSEDTAVYYCTRGVDSGVWGQGTTVTVSS

SEQ ID NO: 847 - protein, 109 aa, Artificial Sequence
  Synthetic Construct
TQSPDSLAVSLGERATINCKSSQSVLDSSNNKKFLAWFQQKPGQRPKLLIYWASTRESGVPDRFTGSGSGTDFTLTISSLQAEDVAVYYCQQYYSPPHTFGQGTKLEIK

SEQ ID NO: 848 - protein, 22 aa, Artificial Sequence
  Synthetic Construct
LVQSGAEVKKPGASVKVSCKAS

SEQ ID NO: 849 - protein, 17 aa, Artificial Sequence
  Synthetic Construct
INWVRQATGQGLEWMGW

SEQ ID NO: 850 - protein, 38 aa, Artificial Sequence
  Synthetic Construct
GYAQKFHGRVIMSWNTSISTAYMELSSLRSEDTAVYYC

SEQ ID NO: 851 - protein, 11 aa, Artificial Sequence
  Synthetic Construct
WGQGTTVTVSS

SEQ ID NO: 852 - protein, 22 aa, Artificial Sequence
  Synthetic Construct
TQSPDSLAVSLGERATINCKSS

SEQ ID NO: 853 - protein, 17 aa, Artificial Sequence
  Synthetic Construct
LAWFQQKPGQRPKLLIY

SEQ ID NO: 854 - protein, 36 aa, Artificial Sequence
  Synthetic Construct
TRESGVPDRFTGSGSGTDFTLTISSLQAEDVAVYYC

SEQ ID NO: 855 - protein, 10 aa, Artificial Sequence
  Synthetic Construct
FGQGTKLEIK

SEQ ID NO: 856 - protein, 255 aa, Artificial Sequence
  Synthetic Construct
  misc_feature (136)..(136): Xaa can be any naturally occurring amino acid
  misc_feature (206)..(206): Xaa can be any naturally occurring amino acid
LVQSGAEVKKPGASVKVSCKASGYTFTRYDINWVRQATGQGLEWMGWMNPKSGETGYAQKFHGRVIMSWNTSISTAYMELSSLRSEDTAVYYCTRGVDSGVWGQGTTVTVSSKGPSVFPLAPSSKSTSGGTAALGXLVKDYFPEPVTVSWNSGALTSGVHTFPAVLQSSGLYSLSSVVTVPSSSLGTQTYICNVNHKPSNTKVDKXVEPKSCDKTHTCPPCPAPELLGGPSVFLFPPKPKDTLMISRTPEVTCVV

SEQ ID NO: 857 - protein, 213 aa, Artificial Sequence
  Synthetic Construct
TQSPDSLAVSLGERATINCKSSQSVLDSSNNKKFLAWFQQKPGQRPKLLIYWASTRESGVPDRFTGSGSGTDFTLTISSLQAEDVAVYYCQQYYSPPHTFGQGTKLEIKAPSVFIFPPSDEQLKSGTASVVCLLNNFYPREAKVQWKVDNALQSGNSQESVTEQDSKDSTYSLSSTLTLSKADYEKHKVYACEVTHQGLSSPVTKSFNRGECK

SEQ ID NO: 858 - DNA, 255 bp, Artificial Sequence
  Synthetic Construct
ctggtgcagtctggggctgaggtgaagaagcctggggcctcagtgaaggtctcctgcaaggcttctggatacaccttcaccagatatgatatcaattgggtgcgacaggccactggacaagggcttgagtggatgggatggatgaaccctaaaagtggtgagacagggtatgcacagaagttccacggcagagtcatcatgagctggaacacctccattagtacagcctacatggagctgagcagcctgagatct

SEQ ID NO: 859 - DNA, 255 bp, Artificial Sequence
  Synthetic Construct
tgacccagtctccagactccctggctgtgtctctgggcgagagggccaccatcaactgcaagtccagccagagtgttttagacagctccaacaataagaagttcttagcctggttccagcagaaaccaggacagcgtcctaagttgctcatttactgggcatctacccgggaatccggggtccctgaccgattcactggcagcgggtctgggacagatttcactctcaccatcagcagcctgcaggctgaagatg

SEQ ID NO: 860 - protein, 8 aa, Artificial Sequence
  Synthetic Construct
GGSISSYY

SEQ ID NO: 861 - protein, 7 aa, Artificial Sequence
  Synthetic Construct
IFTSGST

SEQ ID NO: 862 - protein, 19 aa, Artificial Sequence
  Synthetic Construct
ARDRRGLSYGTNWNWYFDL

SEQ ID NO: 863 - protein, 6 aa, Artificial Sequence
  Synthetic Construct
QSISSN

SEQ ID NO: 864 - protein, 3 aa, Artificial Sequence
  Synthetic Construct
AIS

SEQ ID NO: 865 - protein, 9 aa, Artificial Sequence
  Synthetic Construct
QQSDNTPRT

SEQ ID NO: 866 - protein, 122 aa, Artificial Sequence
  Synthetic Construct
LQESGPGLVKPSETLSLTCIVSGGSISSYYWGWIRQPAGRGLEWIGRIFTSGSTNYNPSLKSRVSMSVDTSRNQFSLTLTSVTAADTAIYFCARDRRGLSYGTNWNWYFDLWGRGTLVTVSS

SEQ ID NO: 867 - protein, 103 aa, Artificial Sequence
  Synthetic Construct
  misc_feature (1)..(1): Xaa can be any naturally occurring amino acid
XQSPSSLSASVGDRVTITCRASQSISSNLNWYQQKPGKAPKLLIYAISTLQSGVPSRFTGSGSGTEFTLTISHLQPEDFATYYCQQSDNTPRTFGQGTKVDVK

SEQ ID NO: 868 - protein, 22 aa, Artificial Sequence
  Synthetic Construct
LQESGPGLVKPSETLSLTCIVS

SEQ ID NO: 869 - protein, 17 aa, Artificial Sequence
  Synthetic Construct
WGWIRQPAGRGLEWIGR

SEQ ID NO: 870 - protein, 38 aa, Artificial Sequence
  Synthetic Construct
NYNPSLKSRVSMSVDTSRNQFSLTLTSVTAADTAIYFC

SEQ ID NO: 871 - protein, 11 aa, Artificial Sequence
  Synthetic Construct
WGRGTLVTVSS

SEQ ID NO: 872 - protein, 22 aa, Artificial Sequence
  Synthetic Construct
  misc_feature (1)..(1): Xaa can be any naturally occurring amino acid
XQSPSSLSASVGDRVTITCRAS

SEQ ID NO: 873 - protein, 17 aa, Artificial Sequence
  Synthetic Construct
LNWYQQKPGKAPKLLIY

SEQ ID NO: 874 - protein, 36 aa, Artificial Sequence
  Synthetic Construct
TLQSGVPSRFTGSGSGTEFTLTISHLQPEDFATYYC

SEQ ID NO: 875 - protein, 10 aa, Artificial Sequence
  Synthetic Construct
FGQGTKVDVK

SEQ ID NO: 876 - protein, 255 aa, Artificial Sequence
  Synthetic Construct
  misc_feature (146)..(146): Xaa can be any naturally occurring amino acid
  misc_feature (216)..(216): Xaa can be any naturally occurring amino acid
LQESGPGLVKPSETLSLTCIVSGGSISSYYWGWIRQPAGRGLEWIGRIFTSGSTNYNPSLKSRVSMSVDTSRNQFSLTLTSVTAADTAIYFCARDRRGLSYGTNWNWYFDLWGRGTLVTVSSKGPSVFPLAPSSKSTSGGTAALGXLVKDYFPEPVTVSWNSGALTSGVHTFPAVLQSSGLYSLSSVVTVPSSSLGTQTYICNVNHKPSNTKVDKXVEPKSCDKTHTCPPCPAPELLGGPSVFLFPPKPKDTLMI

SEQ ID NO: 877 - protein, 207 aa, Artificial Sequence
  Synthetic Construct
  misc_feature (1)..(1): Xaa can be any naturally occurring amino acid
XQSPSSLSASVGDRVTITCRASQSISSNLNWYQQKPGKAPKLLIYAISTLQSGVPSRFTGSGSGTEFTLTISHLQPEDFATYYCQQSDNTPRTFGQGTKVDVKAPSVFIFPPSDEQLKSGTASVVCLLNNFYPREAKVQWKVDNALQSGNSQESVTEQDSKDSTYSLSSTLTLSKADYEKHKVYACEVTHQGLSSPVTKSFNRGECK

SEQ ID NO: 878 - DNA, 255 bp, Artificial Sequence
  Synthetic Construct
ctgcaggagtcgggcccaggactggtgaagccttcggagaccctgtccctcacctgcattgtctctggtggctccatcagtagttattactggggctggatccggcagcccgccgggagggggctggaatggattgggcgtatctttaccagtgggagcaccaactataacccctccctcaagagtcgagtcagcatgtcagtagacacgtccaggaaccagttctccctgacactgacctctgtgaccgccgcg

SEQ ID NO: 879 - DNA, 255 bp, Artificial Sequence
  Synthetic Construct
  misc_feature (3)..(3): n is a, c, g, t or u
ganccagtctccatcctccctgtctgcatctgtaggagacagagtcaccatcacttgccgggcaagtcagagcattagcagcaatttaaattggtatcagcagaaaccagggaaagcccctaaactcctgatctatgccatatccactttgcaaagtggggtcccatcgcggttcactggaagtggatctgggacagaattcactctcaccatcagtcatctgcaacctgaagattttgcaacgtactactgtca

SEQ ID NO: 880 - protein, 8 aa, Artificial Sequence
  Synthetic Construct
GFIFSDYS

SEQ ID NO: 881 - protein, 8 aa, Artificial Sequence
  Synthetic Construct
IRFDSTTR

SEQ ID NO: 882 - protein, 11 aa, Artificial Sequence
  Synthetic Construct
VKDSGLRTLSD

SEQ ID NO: 883 - protein, 11 aa, Artificial Sequence
  Synthetic Construct
QSLLHSNGYNY

SEQ ID NO: 884 - protein, 3 aa, Artificial Sequence
  Synthetic Construct
MAS

SEQ ID NO: 885 - protein, 8 aa, Artificial Sequence
  Synthetic Construct
MQALQTWT

SEQ ID NO: 886 - protein, 118 aa, Artificial Sequence
  Synthetic Construct
RCPAVESGGGVVQPGGSVRLSCAASGFIFSDYSMHWVRQAPGKGLEWVSFIRFDSTTRDYGDSVKGRFIISRDDSKNTLYLQMTSLRPDDTAVYYCVKDSGLRTLSDWGPGTLVTVSS

SEQ ID NO: 887 - protein, 111 aa, Artificial Sequence
  Synthetic Construct
  misc_feature (3)..(4): Xaa can be any naturally occurring amino acid
RCXXTQSPLSLPVTPGEPASISCRCSQSLLHSNGYNYLDWYVQKPGQSPQLLIYMASKRASGVPDRFSGSGSGTDFTLKISRVEAEDVGVYYCMQALQTWTFGPGTKVEIK

SEQ ID NO: 888 - protein, 25 aa, Artificial Sequence
  Synthetic Construct
RCPAVESGGGVVQPGGSVRLSCAAS

SEQ ID NO: 889 - protein, 17 aa, Artificial Sequence
  Synthetic Construct
MHWVRQAPGKGLEWVSF

SEQ ID NO: 890 - protein, 38 aa, Artificial Sequence
  Synthetic Construct
DYGDSVKGRFIISRDDSKNTLYLQMTSLRPDDTAVYYC

SEQ ID NO: 891 - protein, 11 aa, Artificial Sequence
  Synthetic Construct
WGPGTLVTVSS

SEQ ID NO: 892 - protein, 26 aa, Artificial Sequence
  Synthetic Construct
  misc_feature (3)..(4): Xaa can be any naturally occurring amino acid
RCXXTQSPLSLPVTPGEPASISCRCS

SEQ ID NO: 893 - protein, 17 aa, Artificial Sequence
  Synthetic Construct
LDWYVQKPGQSPQLLIY

SEQ ID NO: 894 - protein, 36 aa, Artificial Sequence; identical to SEQ ID NO: 195
  Synthetic Construct

SEQ ID NO: 895 - protein, 10 aa, Artificial Sequence
  Synthetic Construct
FGPGTKVEIK

SEQ ID NO: 896 - protein, 255 aa, Artificial Sequence
  Synthetic Construct
  misc_feature (142)..(142): Xaa can be any naturally occurring amino acid
  misc_feature (212)..(212): Xaa can be any naturally occurring amino acid
RCPAVESGGGVVQPGGSVRLSCAASGFIFSDYSMHWVRQAPGKGLEWVSFIRFDSTTRDYGDSVKGRFIISRDDSKNTLYLQMTSLRPDDTAVYYCVKDSGLRTLSDWGPGTLVTVSSKGPSVFPLAPSSKSTSGGTAALGXLVKDYFPEPVTVSWNSGALTSGVHTFPAVLQSSGLYSLSSVVTVPSSSLGTQTYICNVNHKPSNTKVDKXVEPKSCDKTHTCPPCPAPELLGGPSVFLFPPKPKDTLMISRTP

SEQ ID NO: 897 - protein, 215 aa, Artificial Sequence
  Synthetic Construct
  misc_feature (3)..(4): Xaa can be any naturally occurring amino acid
RCXXTQSPLSLPVTPGEPASISCRCSQSLLHSNGYNYLDWYVQKPGQSPQLLIYMASKRASGVPDRFSGSGSGTDFTLKISRVEAEDVGVYYCMQALQTWTFGPGTKVEIKAPSVFIFPPSDEQLKSGTASVVCLLNNFYPREAKVQWKVDNALQSGNSQESVTEQDSKDSTYSLSSTLTLSKADYEKHKVYACEVTHQGLSSPVTKSFNRGECK

SEQ ID NO: 898 - DNA, 255 bp, Artificial Sequence
  Synthetic Construct
aggtgcccagcggtggagtctgggggaggcgtggtccagcctggggggtccgtgagactctcctgtgcagcgtctggattcatcttcagtgactattccatgcactgggtccgccaggctccaggcaaggggctggagtgggtgtcgtttataagatttgactcaaccactagagattatggagactccgtgaagggccgattcatcatctccagagacgattccaagaacacgttgtatctccaaatgaccagc

SEQ ID NO: 899 - DNA, 255 bp, Artificial Sequence
  Synthetic Construct
  misc_feature (9)..(10): n is a, c, g, t or u
cgatgttgnnagactcagtctccactctccctgcccgtcacccctggagagccggcctccatctcctgcaggtgtagtcaaagcctcctgcatagtaatggatacaactatttggattggtacgtgcagaagccagggcagtctccacaactgctgatctatatggcttctaagcgggcctccggggtccctgacaggttcagtggcagtggatcaggcacagactttactctgaaaatcagcagagtggaggct

SEQ ID NO: 900 - protein, 8 aa, Artificial Sequence
  Synthetic Construct
GFPFDDFV

SEQ ID NO: 901 - protein, 8 aa, Artificial Sequence
  Synthetic Construct
ISSRRTNT

SEQ ID NO: 902 - protein, 19 aa, Artificial Sequence
  Synthetic Construct
AKGETRYLEWIIQSSGFDY

SEQ ID NO: 903 - protein, 6 aa, Artificial Sequence
  Synthetic Construct
QTISTY

SEQ ID NO: 904 - protein, 3 aa, Artificial Sequence
  Synthetic Construct
AAS

SEQ ID NO: 905 - protein, 9 aa, Artificial Sequence
  Synthetic Construct
QQTYNVPPT

SEQ ID NO: 906 - protein, 121 aa, Artificial Sequence
  Synthetic Construct
ESGGGLVQPGGSLRLSCVASGFPFDDFVFAWVRQAPGGGLEWVSAISSRRTNTFYADSVKGRFTISRDNTRKTVNLQMNSLRGEDTAVYYCAKGETRYLEWIIQSSGFDYWGPGTLVAVSS

SEQ ID NO: 907 - protein, 102 aa, Artificial Sequence
  Synthetic Construct
QSPSSLSASVGERVTITCRANQTISTYLNWYQQKVGKAPKSLIRAASSLESGVPSRFSGSGSGTDFTLTINSLQREDFATYYCQQTYNVPPTFGQGTRVELK

SEQ ID NO: 908 - protein, 20 aa, Artificial Sequence
  Synthetic Construct
ESGGGLVQPGGSLRLSCVAS

SEQ ID NO: 909 - protein, 17 aa, Artificial Sequence
  Synthetic Construct
FAWVRQAPGGGLEWVSA

SEQ ID NO: 910 - protein, 38 aa, Artificial Sequence
  Synthetic Construct
FYADSVKGRFTISRDNTRKTVNLQMNSLRGEDTAVYYC

SEQ ID NO: 911 - protein, 11 aa, Artificial Sequence
  Synthetic Construct
WGPGTLVAVSS

SEQ ID NO: 912 - protein, 21 aa, Artificial Sequence
  Synthetic Construct
QSPSSLSASVGERVTITCRAN

SEQ ID NO: 913 - protein, 17 aa, Artificial Sequence
  Synthetic Construct
LNWYQQKVGKAPKSLIR

SEQ ID NO: 914 - protein, 36 aa, Artificial Sequence
  Synthetic Construct
SLESGVPSRFSGSGSGTDFTLTINSLQREDFATYYC

SEQ ID NO: 915 - protein, 10 aa, Artificial Sequence
  Synthetic Construct
FGQGTRVELK

SEQ ID NO: 916 - protein, 255 aa, Artificial Sequence
  Synthetic Construct
  misc_feature (145)..(145): Xaa can be any naturally occurring amino acid
  misc_feature (215)..(215): Xaa can be any naturally occurring amino acid
ESGGGLVQPGGSLRLSCVASGFPFDDFVFAWVRQAPGGGLEWVSAISSRRTNTFYADSVKGRFTISRDNTRKTVNLQMNSLRGEDTAVYYCAKGETRYLEWIIQSSGFDYWGPGTLVAVSSKGPSVFPLAPSSKSTSGGTAALGXLVKDYFPEPVTVSWNSGALTSGVHTFPAVLQSSGLYSLSSVVTVPSSSLGTQTYICNVNHKPSNTKVDKXVEPKSCDKTHTCPPCPAPELLGGPSVFLFPPKPKDTLMIS

SEQ ID NO: 917 - protein, 206 aa, Artificial Sequence
  Synthetic Construct
QSPSSLSASVGERVTITCRANQTISTYLNWYQQKVGKAPKSLIRAASSLESGVPSRFSGSGSGTDFTLTINSLQREDFATYYCQQTYNVPPTFGQGTRVELKAPSVFIFPPSDEQLKSGTASVVCLLNNFYPREAKVQWKVDNALQSGNSQESVTEQDSKDSTYSLSSTLTLSKADYEKHKVYACEVTHQGLSSPVTKSFNRGECK

SEQ ID NO: 918 - DNA, 255 bp, Artificial Sequence
  Synthetic Construct
ggagtctgggggaggcttggtacaaccgggggggtccctaagactctcctgtgtcgcctctggattcccctttgacgactttgtcttcgcctgggtccgccaggctccaggggggggtctggagtgggtctcggctattagtagtcgtagaactaacacgttctacgcagactctgtgaagggccgattcaccatctccagagacaataccaggaagacagtgaatctgcaaatgaacagcctgagaggcgagga

SEQ ID NO: 919 - DNA, 255 bp, Artificial Sequence
  Synthetic Construct
ccagtcgccgtcctccctgtctgcatctgtgggagaaagagtcaccatcacttgccgggccaatcagaccataagtacttatttaaattggtatcaacaaaaagtagggaaagcccctaagtccctgatccgtgctgcatccagtttagaaagtggggtcccatcaaggtttagtggcagtggatctgggacagacttcactctcaccatcaacagtctgcaacgtgaagattttgcaacttactactgtcaaca

SEQ ID NO: 920 - protein, 8 aa, Artificial Sequence
  Synthetic Construct
GDSIRSYY

SEQ ID NO: 921 - protein, 7 aa, Artificial Sequence
  Synthetic Construct
IFTTGST

SEQ ID NO: 922 - protein, 12 aa, Artificial Sequence
  Synthetic Construct
ARDQTLGRRMDV

SEQ ID NO: 923 - protein, 6 aa, Artificial Sequence
  Synthetic Construct
QDISSW

SEQ ID NO: 924 - protein, 3 aa, Artificial Sequence
  Synthetic Construct
TAS

SEQ ID NO: 925 - protein, 9 aa, Artificial Sequence
  Synthetic Construct
QQGNSFPRT

SEQ ID NO: 926 - protein, 113 aa, Artificial Sequence
  Synthetic Construct
ESGPGLVKPSETLSLTCTVSGDSIRSYYWSWIRQPAGKGLEWVGRIFTTGSTTYNPSLKSRVTMSVDMSKNQISLNLSSVTAADTAVYYCARDQTLGRRMDVWGQGTTVTVSS

SEQ ID NO: 927 - protein, 103 aa, Artificial Sequence
  Synthetic Construct
  misc_feature (1)..(1): Xaa can be any naturally occurring amino acid
XQSPSSVSASVGDRVTITCRASQDISSWLAWYQQKPGKAPKLLIYTASSLQSGVPSRFSGSGSGTDFTLTISSLQPEDFATYYCQQGNSFPRTFGQGTKVEIK

SEQ ID NO: 928 - protein, 20 aa, Artificial Sequence
  Synthetic Construct
ESGPGLVKPSETLSLTCTVS

SEQ ID NO: 929 - protein, 17 aa, Artificial Sequence
  Synthetic Construct
WSWIRQPAGKGLEWVGR

SEQ ID NO: 930 - protein, 38 aa, Artificial Sequence
  Synthetic Construct
TYNPSLKSRVTMSVDMSKNQISLNLSSVTAADTAVYYC

SEQ ID NO: 931 - protein, 11 aa, Artificial Sequence
  Synthetic Construct
WGQGTTVTVSS

SEQ ID NO: 932 - protein, 22 aa, Artificial Sequence
  Synthetic Construct
  misc_feature (1)..(1): Xaa can be any naturally occurring amino acid
XQSPSSVSASVGDRVTITCRAS

SEQ ID NO: 933 - protein, 17 aa, Artificial Sequence
  Synthetic Construct
LAWYQQKPGKAPKLLIY

SEQ ID NO: 934 - protein, 36 aa, Artificial Sequence
  Synthetic Construct
SLQSGVPSRFSGSGSGTDFTLTISSLQPEDFATYYC

SEQ ID NO: 935 - protein, 10 aa, Artificial Sequence
  Synthetic Construct
FGQGTKVEIK

SEQ ID NO: 936 - protein, 255 aa, Artificial Sequence
  Synthetic Construct
  misc_feature (137)..(137): Xaa can be any naturally occurring amino acid
  misc_feature (207)..(207): Xaa can be any naturally occurring amino acid
ESGPGLVKPSETLSLTCTVSGDSIRSYYWSWIRQPAGKGLEWVGRIFTTGSTTYNPSLKSRVTMSVDMSKNQISLNLSSVTAADTAVYYCARDQTLGRRMDVWGQGTTVTVSSKGPSVFPLAPSSKSTSGGTAALGXLVKDYFPEPVTVSWNSGALTSGVHTFPAVLQSSGLYSLSSVVTVPSSSLGTQTYICNVNHKPSNTKVDKXVEPKSCDKTHTCPPCPAPELLGGPSVFLFPPKPKDTLMISRTPEVTCV

SEQ ID NO: 937 - protein, 207 aa, Artificial Sequence
  Synthetic Construct
  misc_feature (1)..(1): Xaa can be any naturally occurring amino acid
XQSPSSVSASVGDRVTITCRASQDISSWLAWYQQKPGKAPKLLIYTASSLQSGVPSRFSGSGSGTDFTLTISSLQPEDFATYYCQQGNSFPRTFGQGTKVEIKAPSVFIFPPSDEQLKSGTASVVCLLNNFYPREAKVQWKVDNALQSGNSQESVTEQDSKDSTYSLSSTLTLSKADYEKHKVYACEVTHQGLSSPVTKSFNRGECK

SEQ ID NO: 938 - DNA, 255 bp, Artificial Sequence
  Synthetic Construct
aggagtcgggcccaggactggtgaagccttcggagaccctgtccctcacctgcactgtctctggtgactccatcagaagttactactggagttggatccggcagcccgccgggaagggactggagtgggttggacgtatctttaccactgggagtaccacctacaacccctccctcaagagtcgagtcaccatgtcagtggatatgtccaagaaccagatctccctgaacctgagctctgtgaccgccgcggaca

SEQ ID NO: 939 - DNA, 255 bp, Artificial Sequence
  Synthetic Construct
  misc_feature (3)..(3): n is a, c, g, t or u
ganccagtctccatcttctgtgtctgcatctgtcggagacagagtcaccatcacttgtcgggcgagtcaggatattagcagctggttagcctggtatcagcagaagccagggaaagcccctaaactcctgatctatactgcatccagtttgcaaagtggggtcccatcaaggttcagcggcagtggatctgggacagatttcactctcactatcagcagcctgcagcctgaagattttgcaacttactattgtca

SEQ ID NO: 940 - protein, 8 aa, Artificial Sequence
  Synthetic Construct
GFSFDDYA

SEQ ID NO: 941 - protein, 8 aa, Artificial Sequence
  Synthetic Construct
ISWNSGTI

SEQ ID NO: 942 - protein, 14 aa, Artificial Sequence
  Synthetic Construct
AKGTGWELVSALEN

SEQ ID NO: 943 - protein, 6 aa, Artificial Sequence
  Synthetic Construct
QTISDY

SEQ ID NO: 944 - protein, 3 aa, Artificial Sequence
  Synthetic Construct
AAS

SEQ ID NO: 945 - protein, 9 aa, Artificial Sequence
  Synthetic Construct
QQSYSPPFT

SEQ ID NO: 946 - protein, 117 aa, Artificial Sequence
  Synthetic Construct
VESGGGLIQPGRSLRLSCAVSGFSFDDYAMYWVRQVPGKGLEWVSGISWNSGTIEYADSVKGRFTISRDNAKKSLFLEMNSLRSEDTAIYYCAKGTGWELVSALENWGQGTVVTVSS

SEQ ID NO: 947 - protein, 102 aa, Artificial Sequence
  Synthetic Construct
QSPSSLSASVGNKVTITCRASQTISDYLNWYQQKPGKAPKLLIYAASSLQSAVPSRFAGSGSGTEFTLTISSLQPEDFATYYCQQSYSPPFTFGPGTKVDIK

SEQ ID NO: 948 - protein, 21 aa, Artificial Sequence
  Synthetic Construct
VESGGGLIQPGRSLRLSCAVS

SEQ ID NO: 949 - protein, 17 aa, Artificial Sequence
  Synthetic Construct
MYWVRQVPGKGLEWVSG

SEQ ID NO: 950 - protein, 38 aa, Artificial Sequence
  Synthetic Construct
EYADSVKGRFTISRDNAKKSLFLEMNSLRSEDTAIYYC

SEQ ID NO: 951 - protein, 11 aa, Artificial Sequence
  Synthetic Construct
WGQGTVVTVSS

SEQ ID NO: 952 - protein, 21 aa, Artificial Sequence
  Synthetic Construct
QSPSSLSASVGNKVTITCRAS

SEQ ID NO: 953 - protein, 17 aa, Artificial Sequence
  Synthetic Construct
LNWYQQKPGKAPKLLIY

SEQ ID NO: 954 - protein, 36 aa, Artificial Sequence
  Synthetic Construct
SLQSAVPSRFAGSGSGTEFTLTISSLQPEDFATYYC

SEQ ID NO: 955 - protein, 10 aa, Artificial Sequence
  Synthetic Construct
FGPGTKVDIK

SEQ ID NO: 956 - protein, 255 aa, Artificial Sequence
  Synthetic Construct
  misc_feature (141)..(141): Xaa can be any naturally occurring amino acid
  misc_feature (211)..(211): Xaa can be any naturally occurring amino acid
VESGGGLIQPGRSLRLSCAVSGFSFDDYAMYWVRQVPGKGLEWVSGISWNSGTIEYADSVKGRFTISRDNAKKSLFLEMNSLRSEDTAIYYCAKGTGWELVSALENWGQGTVVTVSSKGPSVFPLAPSSKSTSGGTAALGXLVKDYFPEPVTVSWNSGALTSGVHTFPAVLQSSGLYSLSSVVTVPSSSLGTQTYICNVNHKPSNTKVDKXVEPKSCDKTHTCPPCPAPELLGGPSVFLFPPKPKDTLMISRTPE

SEQ ID NO: 957 - protein, 206 aa, Artificial Sequence
  Synthetic Construct
QSPSSLSASVGNKVTITCRASQTISDYLNWYQQKPGKAPKLLIYAASSLQSAVPSRFAGSGSGTEFTLTISSLQPEDFATYYCQQSYSPPFTFGPGTKVDIKAPSVFIFPPSDEQLKSGTASVVCLLNNFYPREAKVQWKVDNALQSGNSQESVTEQDSKDSTYSLSSTLTLSKADYEKHKVYACEVTHQGLSSPVTKSFNRGECK

SEQ ID NO: 958 - DNA, 255 bp, Artificial Sequence
  Synthetic Construct
gtggaatctgggggaggactgatacagcctggcaggtccctgagactctcctgtgcagtctctggattcagttttgatgactatgccatgtactgggtccgacaagttccagggaagggcctggagtgggtctcaggcattagttggaatagtggaactatagagtatgcggactctgtgaagggccgattcaccatttccagagacaacgccaagaagtccctgtttctagaaatgaacagtctgagaagcgag

SEQ ID NO: 959 - DNA, 255 bp, Artificial Sequence
  Synthetic Construct
ccagtctccatcctccctgtctgcatctgtcggaaacaaagtcaccatcacttgccgggcaagtcagactattagcgactatttaaattggtatcagcaaaaaccagggaaagcccctaaactcctgatctatgccgcgtccagtttgcaaagtgcagtcccatcaaggttcgctggcagtggatctgggacagagttcaccctcaccatcagcagtctgcaacctgaagattttgcaacttactactgtcaaca

SEQ ID NO: 960 - protein, 8 aa, Artificial Sequence
  Synthetic Construct
GFTFDDYA

SEQ ID NO: 961 - protein, 8 aa, Artificial Sequence
  Synthetic Construct
IGWNSGSI

SEQ ID NO: 962 - protein, 14 aa, Artificial Sequence
  Synthetic Construct
AKDIDSSSWWYFES

SEQ ID NO: 963 - protein, 7 aa, Artificial Sequence
  Synthetic Construct
QSLTNNY

SEQ ID NO: 964 - protein, 3 aa, Artificial Sequence
  Synthetic Construct
GAS

SEQ ID NO: 965 - protein, 8 aa, Artificial Sequence
  Synthetic Construct
QKYGTSLT

SEQ ID NO: 966 - protein, 117 aa, Artificial Sequence
  Synthetic Construct
VESGGNLVQPGRSLRLSCAASGFTFDDYAMHWVRQSPGKGLEWVSGIGWNSGSIEYADSVKGRFTISRDNAKNSLYLQMNSLRLEDTAVYYCAKDIDSSSWWYFESWGQGTLVTVSS

SEQ ID NO: 967 - protein, 103 aa, Artificial Sequence
  Synthetic Construct
TQSPGTLSLSPGERVTLSCRASQSLTNNYLAWYQHKPGQAPRLLIYGASTRATGIPDRFSGSGSGTDFTLTISRLEPEDLAVYYCQKYGTSLTFGGGTKVEIK

SEQ ID NO: 968 - protein, 21 aa, Artificial Sequence
  Synthetic Construct
VESGGNLVQPGRSLRLSCAAS

SEQ ID NO: 969 - protein, 17 aa, Artificial Sequence
  Synthetic Construct
MHWVRQSPGKGLEWVSG

SEQ ID NO: 970 - protein, 38 aa, Artificial Sequence
  Synthetic Construct
EYADSVKGRFTISRDNAKNSLYLQMNSLRLEDTAVYYC

SEQ ID NO: 971 - protein, 11 aa, Artificial Sequence
  Synthetic Construct
WGQGTLVTVSS

SEQ ID NO: 972 - protein, 22 aa, Artificial Sequence
  Synthetic Construct
TQSPGTLSLSPGERVTLSCRAS

SEQ ID NO: 973 - protein, 17 aa, Artificial Sequence
  Synthetic Construct
LAWYQHKPGQAPRLLIY

SEQ ID NO: 974 - protein, 36 aa, Artificial Sequence
  Synthetic Construct
TRATGIPDRFSGSGSGTDFTLTISRLEPEDLAVYYC

SEQ ID NO: 975 - protein, 10 aa, Artificial Sequence
  Synthetic Construct
FGGGTKVEIK

SEQ ID NO: 976 - protein, 255 aa, Artificial Sequence
  Synthetic Construct
  misc_feature (141)..(141): Xaa can be any naturally occurring amino acid
  misc_feature (211)..(211): Xaa can be any naturally occurring amino acid
VESGGNLVQPGRSLRLSCAASGFTFDDYAMHWVRQSPGKGLEWVSGIGWNSGSIEYADSVKGRFTISRDNAKNSLYLQMNSLRLEDTAVYYCAKDIDSSSWWYFESWGQGTLVTVSSKGPSVFPLAPSSKSTSGGTAALGXLVKDYFPEPVTVSWNSGALTSGVHTFPAVLQSSGLYSLSSVVTVPSSSLGTQTYICNVNHKPSNTKVDKXVEPKSCDKTHTCPPCPAPELLGGPSVFLFPPKPKDTLMISRTPE

SEQ ID NO: 977 - protein, 207 aa, Artificial Sequence
  Synthetic Construct
TQSPGTLSLSPGERVTLSCRASQSLTNNYLAWYQHKPGQAPRLLIYGASTRATGIPDRFSGSGSGTDFTLTISRLEPEDLAVYYCQKYGTSLTFGGGTKVEIKAPSVFIFPPSDEQLKSGTASVVCLLNNFYPREAKVQWKVDNALQSGNSQESVTEQDSKDSTYSLSSTLTLSKADYEKHKVYACEVTHQGLSSPVTKSFNRGECK

SEQ ID NO: 978 - DNA, 255 bp, Artificial Sequence
  Synthetic Construct
ggtggagtctgggggaaacttggtacagcctggcaggtccctgagactctcctgtgcagcctctggattcacctttgacgactatgccatgcactgggtccggcaaagtccagggaagggcctggagtgggtctcaggtattggttggaacagcggtagcatcgaatatgcggactctgtgaagggccgattcaccatctccagagacaacgccaagaactccctgtatttgcaaatgaacagtctgagacttga

SEQ ID NO: 979 - DNA, 255 bp, Artificial Sequence
  Synthetic Construct
gacgcagtctccaggcaccctgtctttgtctccaggggaaagagtcaccctctcctgcagggccagtcagagtctcaccaacaattacttagcctggtaccaacacaaacctggccaggctcccaggctactcatctatggtgcatctacccgggccaccggcatcccagacaggttcagtggcagtgggtctgggacagacttcactctcaccatcagcagactggagcctgaagatttggcagtatattactg

SEQ ID NO: 980 - protein, 8 aa, Artificial Sequence
  Synthetic Construct
GFPFEKFA

SEQ ID NO: 981 - protein, 8 aa, Artificial Sequence
  Synthetic Construct
ISGTGAVT

SEQ ID NO: 982 - protein, 15 aa, Artificial Sequence
  Synthetic Construct
AKDRTPVTNYYGMDV

SEQ ID NO: 983 - protein, 6 aa, Artificial Sequence
  Synthetic Construct
QSISSY

SEQ ID NO: 984 - protein, 3 aa, Artificial Sequence
  Synthetic Construct
AAS

SEQ ID NO: 985 - protein, 10 aa, Artificial Sequence
  Synthetic Construct
QQSYSTPMAT

SEQ ID NO: 986 - protein, 122 aa, Artificial Sequence
  Synthetic Construct
QVQLVESGGNLGQPGGSLRLSCAASGFPFEKFAINWVRQAPGKGLEWVSAISGTGAVTYYADSVEGRFSISRDNSKNTVFLEMNSLRVEDTAVYFCAKDRTPVTNYYGMDVWGQGTTVTVSS

SEQ ID NO: 987 - protein, 108 aa, Artificial Sequence
  Synthetic Construct
  misc_feature (4)..(4): Xaa can be any naturally occurring amino acid
DIGXTQSPSSLSASVGDRVTITCRASQSISSYLNWYQQKPGKAPKLLIYAASSLQSGVPSRFSGSGSGTDFTLTISSLQPEDFATYYCQQSYSTPMATFGGGTKVEIK

SEQ ID NO: 988 - protein, 25 aa, Artificial Sequence
  Synthetic Construct
QVQLVESGGNLGQPGGSLRLSCAAS

SEQ ID NO: 989 - protein, 17 aa, Artificial Sequence
  Synthetic Construct
INWVRQAPGKGLEWVSA

SEQ ID NO: 990 - protein, 38 aa, Artificial Sequence; identical to SEQ ID NO: 727
  Synthetic Construct

SEQ ID NO: 991 - protein, 11 aa, Artificial Sequence
  Synthetic Construct
WGQGTTVTVSS

SEQ ID NO: 992 - protein, 26 aa, Artificial Sequence
  Synthetic Construct
  misc_feature (4)..(4): Xaa can be any naturally occurring amino acid
DIGXTQSPSSLSASVGDRVTITCRAS

SEQ ID NO: 993 - protein, 17 aa, Artificial Sequence
  Synthetic Construct
LNWYQQKPGKAPKLLIY

SEQ ID NO: 994 - protein, 36 aa, Artificial Sequence; identical to SEQ ID NO: 934
  Synthetic Construct

SEQ ID NO: 995 - protein, 10 aa, Artificial Sequence
  Synthetic Construct
FGGGTKVEIK

SEQ ID NO: 996 - protein, 255 aa, Artificial Sequence
  Synthetic Construct
  misc_feature (146)..(146): Xaa can be any naturally occurring amino acid
  misc_feature (216)..(216): Xaa can be any naturally occurring amino acid
QVQLVESGGNLGQPGGSLRLSCAASGFPFEKFAINWVRQAPGKGLEWVSAISGTGAVTYYADSVEGRFSISRDNSKNTVFLEMNSLRVEDTAVYFCAKDRTPVTNYYGMDVWGQGTTVTVSSKGPSVFPLAPSSKSTSGGTAALGXLVKDYFPEPVTVSWNSGALTSGVHTFPAVLQSSGLYSLSSVVTVPSSSLGTQTYICNVNHKPSNTKVDKXVEPKSCDKTHTCPPCPAPELLGGPSVFLFPPKPKDTLMI

SEQ ID NO: 997 - protein, 212 aa, Artificial Sequence
  Synthetic Construct
  misc_feature (4)..(4): Xaa can be any naturally occurring amino acid
DIGXTQSPSSLSASVGDRVTITCRASQSISSYLNWYQQKPGKAPKLLIYAASSLQSGVPSRFSGSGSGTDFTLTISSLQPEDFATYYCQQSYSTPMATFGGGTKVEIKAPSVFIFPPSDEQLKSGTASVVCLLNNFYPREAKVQWKVDNALQSGNSQESVTEQDSKDSTYSLSSTLTLSKADYEKHKVYACEVTHQGLSSPVTKSFNRGECK

SEQ ID NO: 998 - DNA, 255 bp, Artificial Sequence
  Synthetic Construct
caggtgcagctggtggagtctgggggaaacttgggacagccgggggggtccctgagactgtcctgtgcagcctctggattcccctttgagaagtttgccatcaactgggtccgccaggctccagggaaggggctggagtgggtctcggctattagtggtactggtgctgtcacatactacgcagactccgtggagggccggttctccatctccagagacaattccaagaacacggtgtttctggagatgaacagc

SEQ ID NO: 999 - DNA, 255 bp, Artificial Sequence
  Synthetic Construct
  misc_feature (9)..(10): n is a, c, g, t or u
gacatcggnntgacccagtctccatcctccctgtctgcatctgtaggagacagagtcaccatcacttgccgggcaagtcagagcattagcagctatttaaattggtatcagcagaaaccagggaaagcccctaagctcctgatctatgctgcatccagtttgcaaagtggggtcccatcaaggttcagtggcagtggatctgggacagatttcactctcaccatcagcagtctgcaacctgaagattttgcaact

SEQ ID NO: 1000 - protein, 8 aa, Artificial Sequence
  Synthetic Construct
GGSFSGYS

SEQ ID NO: 1001 - protein, 7 aa, Artificial Sequence
  Synthetic Construct
FNHSGNT

SEQ ID NO: 1002 - protein, 23 aa, Artificial Sequence
  Synthetic Construct
ARERDCSGGGCYYPYSYYYGMDV

SEQ ID NO: 1003 - protein, 6 aa, Artificial Sequence
  Synthetic Construct
QGISIY

SEQ ID NO: 1004 - protein, 3 aa, Artificial Sequence
  Synthetic Construct
AAS

SEQ ID NO: 1005 - protein, 9 aa, Artificial Sequence
  Synthetic Construct
QQFNSYPRV

SEQ ID NO: 1006 - protein, 128 aa, Artificial Sequence
  Synthetic Construct
VQLQQWGAGLLKPSETLSLTCAVYGGSFSGYSWSWIRQPPGKGLEWIGEFNHSGNTNYTPSLKSRVTISVDMSKNHFSLKLSSVTAADTAVYYCARERDCSGGGCYYPYSYYYGMDVWGQGTTVTVSS

SEQ ID NO: 1007 - protein, 105 aa, Artificial Sequence
  Synthetic Construct
  misc_feature (1)..(2): Xaa can be any naturally occurring amino acid
XXTQSPSFLSASVGDRVTITCRASQGISIYLAWYQQNPGKAPKLLIYAASTLQSGVPSRFSGSGSGTEFTLTISNLQPEDFATYYCQQFNSYPRVFGGGTKVEIK

SEQ ID NO: 1008 - protein, 24 aa, Artificial Sequence
  Synthetic Construct
VQLQQWGAGLLKPSETLSLTCAVY

SEQ ID NO: 1009 - protein, 17 aa, Artificial Sequence
  Synthetic Construct
WSWIRQPPGKGLEWIGE

SEQ ID NO: 1010 - protein, 38 aa, Artificial Sequence
  Synthetic Construct
NYTPSLKSRVTISVDMSKNHFSLKLSSVTAADTAVYYC

SEQ ID NO: 1011 - protein, 11 aa, Artificial Sequence
  Synthetic Construct
WGQGTTVTVSS

SEQ ID NO: 1012 - protein, 24 aa, Artificial Sequence
  Synthetic Construct
  misc_feature (1)..(2): Xaa can be any naturally occurring amino acid
XXTQSPSFLSASVGDRVTITCRAS

SEQ ID NO: 1013 - protein, 17 aa, Artificial Sequence
  Synthetic Construct
LAWYQQNPGKAPKLLIY

SEQ ID NO: 1014 - protein, 36 aa, Artificial Sequence
  Synthetic Construct
TLQSGVPSRFSGSGSGTEFTLTISNLQPEDFATYYC

SEQ ID NO: 1015 - protein, 10 aa, Artificial Sequence
  Synthetic Construct
FGGGTKVEIK

SEQ ID NO: 1016 - protein, 255 aa, Artificial Sequence
  Synthetic Construct
  misc_feature (152)..(152): Xaa can be any naturally occurring amino acid
  misc_feature (222)..(222): Xaa can be any naturally occurring amino acid
VQLQQWGAGLLKPSETLSLTCAVYGGSFSGYSWSWIRQPPGKGLEWIGEFNHSGNTNYTPSLKSRVTISVDMSKNHFSLKLSSVTAADTAVYYCARERDCSGGGCYYPYSYYYGMDVWGQGTTVTVSSKGPSVFPLAPSSKSTSGGTAALGXLVKDYFPEPVTVSWNSGALTSGVHTFPAVLQSSGLYSLSSVVTVPSSSLGTQTYICNVNHKPSNTKVDKXVEPKSCDKTHTCPPCPAPELLGGPSVFLFPPKP

SEQ ID NO: 1017 - protein, 209 aa, Artificial Sequence
  Synthetic Construct
  misc_feature (1)..(2): Xaa can be any naturally occurring amino acid
XXTQSPSFLSASVGDRVTITCRASQGISIYLAWYQQNPGKAPKLLIYAASTLQSGVPSRFSGSGSGTEFTLTISNLQPEDFATYYCQQFNSYPRVFGGGTKVEIKAPSVFIFPPSDEQLKSGTASVVCLLNNFYPREAKVQWKVDNALQSGNSQESVTEQDSKDSTYSLSSTLTLSKADYEKHKVYACEVTHQGLSSPVTKSFNRGECK

SEQ ID NO: 1018 - DNA, 255 bp, Artificial Sequence
  Synthetic Construct
aggtgcagctgcagcagtggggcgcaggactgttgaagccttcggagaccctgtccctcacctgcgctgtttatggtgggtccttcagtggttactcctggagctggatccgccagcccccagggaaggggctagagtggattggggaattcaatcatagtggaaacaccaactacaccccgtccctcaagagtcgagtcaccatatcagtagacatgtccaagaaccacttctccctgaagctgagctctgtga

SEQ ID NO: 1019 - DNA, 255 bp, Artificial Sequence
  Synthetic Construct
  misc_feature (2)..(2): n is a, c, g, t or u
  misc_feature (5)..(5): n is a, c, g, t or u
  misc_feature (7)..(7): n is a, c, g, t or u
tnccngnacccagtctccatccttcctgtctgcatctgtaggagacagagtcaccatcacttgccgggccagtcagggcattagcatttatttagcctggtatcagcaaaacccagggaaagcccctaagctcctgatctatgctgcatccactttgcaaagtggggtcccatcaaggttcagcggcagtgggtctgggacagagttcactctcacaatcagcaacctgcagcctgaagattttgcaacttatta

SEQ ID NO: 1020 - protein, 8 aa, Artificial Sequence
  Synthetic Construct
GFTVEDYT

SEQ ID NO: 1021 - protein, 8 aa, Artificial Sequence
  Synthetic Construct
ISWDGDRT

SEQ ID NO: 1022 - protein, 11 aa, Artificial Sequence
  Synthetic Construct
VKDNGWRSFAY

SEQ ID NO: 1023 - protein, 11 aa, Artificial Sequence
  Synthetic Construct
QSLLHSNGYNY

SEQ ID NO: 1024 - protein, 3 aa, Artificial Sequence
  Synthetic Construct
LGS

SEQ ID NO: 1025 - protein, 8 aa, Artificial Sequence
  Synthetic Construct
MQALQAFT

SEQ ID NO: 1026 - protein, 113 aa, Artificial Sequence
  Synthetic Construct
ESGGAVVQPGGSLRLSCAASGFTVEDYTIHWVRQVPGKGLEWISLISWDGDRTAYTDSVKGRFTISRDNIKNSLYLLMNSLRTEDTALYYCVKDNGWRSFAYWGQGILVTVST

SEQ ID NO: 1027 - protein, 107 aa, Artificial Sequence
  Synthetic Construct
TQSPLSLPVTPGEPASISCRSSQSLLHSNGYNYLDWYLQRPGQSPQLLIYLGSKRASGVPDRFSGSGSGTDFTLKISRVEAEDVGVYYCMQALQAFTFGPGTKVDIK

SEQ ID NO: 1028 - protein, 20 aa, Artificial Sequence
  Synthetic Construct
ESGGAVVQPGGSLRLSCAAS

SEQ ID NO: 1029 - protein, 17 aa, Artificial Sequence
  Synthetic Construct
IHWVRQVPGKGLEWISL

SEQ ID NO: 1030 - protein, 38 aa, Artificial Sequence
  Synthetic Construct
AYTDSVKGRFTISRDNIKNSLYLLMNSLRTEDTALYYC

SEQ ID NO: 1031 - protein, 11 aa, Artificial Sequence
  Synthetic Construct
WGQGILVTVST

SEQ ID NO: 1032 - protein, 22 aa, Artificial Sequence
  Synthetic Construct
TQSPLSLPVTPGEPASISCRSS

SEQ ID NO: 1033 - protein, 17 aa, Artificial Sequence
  Synthetic Construct
LDWYLQRPGQSPQLLIY

SEQ ID NO: 1034 - protein, 36 aa, Artificial Sequence; identical to SEQ ID NO: 195
  Synthetic Construct

SEQ ID NO: 1035 - protein, 10 aa, Artificial Sequence
  Synthetic Construct
FGPGTKVDIK

SEQ ID NO: 1036 - protein, 255 aa, Artificial Sequence
  Synthetic Construct
  misc_feature (137)..(137): Xaa can be any naturally occurring amino acid
  misc_feature (207)..(207): Xaa can be any naturally occurring amino acid
ESGGAVVQPGGSLRLSCAASGFTVEDYTIHWVRQVPGKGLEWISLISWDGDRTAYTDSVKGRFTISRDNIKNSLYLLMNSLRTEDTALYYCVKDNGWRSFAYWGQGILVTVSTKGPSVFPLAPSSKSTSGGTAALGXLVKDYFPEPVTVSWNSGALTSGVHTFPAVLQSSGLYSLSSVVTVPSSSLGTQTYICNVNHKPSNTKVDKXVEPKSCDKTHTCPPCPAPELLGGPSVFLFPPKPKDTLMISRTPEVTCV

SEQ ID NO: 1037 - protein, 211 aa, Artificial Sequence
  Synthetic Construct
TQSPLSLPVTPGEPASISCRSSQSLLHSNGYNYLDWYLQRPGQSPQLLIYLGSKRASGVPDRFSGSGSGTDFTLKISRVEAEDVGVYYCMQALQAFTFGPGTKVDIKAPSVFIFPPSDEQLKSGTASVVCLLNNFYPREAKVQWKVDNALQSGNSQESVTEQDSKDSTYSLSSTLTLSKADYEKHKVYACEVTHQGLSSPVTKSFNRGECK

SEQ ID NO: 1038 - DNA, 255 bp, Artificial Sequence
  Synthetic Construct
tggagtctgggggagccgtggttcagcctggggggtccctgagactctcctgtgcagcctctggattcaccgttgaagattataccatccactgggtccgtcaggttccggggaagggtctggagtggatctctcttattagttgggatggtgatagaacagcgtatacagactctgtgaagggccgattcaccatctcccgagacaacatcaaaaactccctgtatctactaatgaacagtctcagaactgagg

SEQ ID NO: 1039 - DNA, 255 bp, Artificial Sequence
  Synthetic Construct
gactcagtctccactctccctgcccgtcacccctggagagccggcctccatctcctgcaggtcaagtcagagtctcctgcatagtaatggatacaactatttggattggtacctgcagaggccagggcagtctcctcaactcctgatctatttgggctctaagcgggcctccggggtccctgacaggttcagcggcagtggatcaggcacagattttacactgaaaatcagtagagtggaggctgaggacgttgg

SEQ ID NO: 1040 - protein, 8 aa, Artificial Sequence
  Synthetic Construct
  misc_feature (6)..(6): Xaa can be any naturally occurring amino acid
GFSFNXYA

SEQ ID NO: 1041 - protein, 8 aa, Artificial Sequence
  Synthetic Construct
VSYSGETT

SEQ ID NO: 1042 - protein, 16 aa, Artificial Sequence
  Synthetic Construct
AIGGLALYCSGGSCWH

SEQ ID NO: 1043 - protein, 6 aa, Artificial Sequence
  Synthetic Construct
QGISSY

SEQ ID NO: 1044 - protein, 3 aa, Artificial Sequence
  Synthetic Construct
AAS

SEQ ID NO: 1045 - protein, 9 aa, Artificial Sequence
  Synthetic Construct
QQLNTYPLT

SEQ ID NO: 1046 - protein, 116 aa, Artificial Sequence
  Synthetic Construct
  misc_feature (2)..(2): Xaa can be any naturally occurring amino acid
  misc_feature (4)..(7): Xaa can be any naturally occurring amino acid
  misc_feature (9)..(9): Xaa can be any naturally occurring amino acid
  misc_feature (12)..(13): Xaa can be any naturally occurring amino acid
  misc_feature (24)..(24): Xaa can be any naturally occurring amino acid
GXGXXXXGXSLXXSCAASGFSFNXYAMSWVRQAPGKGLDWVATVSYSGETTHYAESVKGRFTISRDNSENTVSLQMNSLRAEDSAAYYCAIGGLALYCSGGSCWHWGQGTLVTVSP

SEQ ID NO: 1047 - protein, 103 aa, Artificial Sequence
  Synthetic Construct
TQSPSFLSASVGDRVTITCRASQGISSYLAWYQQKPGKAPKLLIYAASTLQNGVPSRFSGGGSGTEFTLTISSLQPEDFATYYCQQLNTYPLTFGGGTKVEIK

SEQ ID NO: 1048 - protein, 18 aa, Artificial Sequence
  Synthetic Construct
  misc_feature (2)..(2): Xaa can be any naturally occurring amino acid
  misc_feature (4)..(7): Xaa can be any naturally occurring amino acid
  misc_feature (9)..(9): Xaa can be any naturally occurring amino acid
  misc_feature (12)..(13): Xaa can be any naturally occurring amino acid
GXGXXXXGXSLXXSCAAS

SEQ ID NO: 1049 - protein, 17 aa, Artificial Sequence
  Synthetic Construct
MSWVRQAPGKGLDWVAT

SEQ ID NO: 1050 - protein, 38 aa, Artificial Sequence
  Synthetic Construct
HYAESVKGRFTISRDNSENTVSLQMNSLRAEDSAAYYC

SEQ ID NO: 1051 - protein, 11 aa, Artificial Sequence
  Synthetic Construct
WGQGTLVTVSP

SEQ ID NO: 1052 - protein, 22 aa, Artificial Sequence
  Synthetic Construct
TQSPSFLSASVGDRVTITCRAS

SEQ ID NO: 1053 - protein, 17 aa, Artificial Sequence
  Synthetic Construct
LAWYQQKPGKAPKLLIY

SEQ ID NO: 1054 - protein, 36 aa, Artificial Sequence
  Synthetic Construct
TLQNGVPSRFSGGGSGTEFTLTISSLQPEDFATYYC

SEQ ID NO: 1055 - protein, 10 aa, Artificial Sequence
  Synthetic Construct
FGGGTKVEIK

SEQ ID NO: 1056 - protein, 255 aa, Artificial Sequence
  Synthetic Construct
  misc_feature (2)..(2): Xaa can be any naturally occurring amino acid
  misc_feature (4)..(7): Xaa can be any naturally occurring amino acid
  misc_feature (9)..(9): Xaa can be any naturally occurring amino acid
  misc_feature (12)..(13): Xaa can be any naturally occurring amino acid
  misc_feature (24)..(24): Xaa can be any naturally occurring amino acid
  misc_feature (140)..(140): Xaa can be any naturally occurring amino acid
  misc_feature (210)..(210): Xaa can be any naturally occurring amino acid
GXGXXXXGXSLXXSCAASGFSFNXYAMSWVRQAPGKGLDWVATVSYSGETTHYAESVKGRFTISRDNSENTVSLQMNSLRAEDSAAYYCAIGGLALYCSGGSCWHWGQGTLVTVSPKGPSVFPLAPSSKSTSGGTAALGXLVKDYFPEPVTVSWNSGALTSGVHTFPAVLQSSGLYSLSSVVTVPSSSLGTQTYICNVNHKPSNTKVDKXVEPKSCDKTHTCPPCPAPELLGGPSVFLFPPKPKDTLMISRTPEV

SEQ ID NO: 1057 - protein, 207 aa, Artificial Sequence
  Synthetic Construct
TQSPSFLSASVGDRVTITCRASQGISSYLAWYQQKPGKAPKLLIYAASTLQNGVPSRFSGGGSGTEFTLTISSLQPEDFATYYCQQLNTYPLTFGGGTKVEIKAPSVFIFPPSDEQLKSGTASVVCLLNNFYPREAKVQWKVDNALQSGNSQESVTEQDSKDSTYSLSSTLTLSKADYEKHKVYACEVTHQGLSSPVTKSFNRGECK

SEQ ID NO: 1058 - DNA, 255 bp, Artificial Sequence
  Synthetic Construct
  misc_feature (36)..(36): n is a, c, g, t or u
wgggkgaggmktsgkwcascmkgggkggtccctganastctcmtgtgcagcctctggattctcctttaacwactatgccatgagctgggtccgccaggctccagggaaggggctggactgggtcgcaacggttagttatagtggtgaaaccacacactacgcagaatccgtgaagggccggttcaccatctccagagacaattccgagaacacggtgtctctgcagatgaacagcctgagagccgaggactcggc

SEQ ID NO: 1059 - DNA, 255 bp, Artificial Sequence
  Synthetic Construct
acccagtctccatccttcctgtctgcatctgtgggagacagagtcaccatcacttgccgggccagtcagggcattagcagttatttagcctggtatcagcaaaaaccagggaaagcccctaagctcctgatctatgctgcatccactttgcaaaatggggtcccatcaaggttcagcggcggtggatctgggacagagttcactctcacaatcagcagcctgcagcctgaagattttgcaacttattactgtcaa

SEQ ID NO: 1060 - protein, 8 aa, Artificial Sequence
  Synthetic Construct
GFTFDNYA

SEQ ID NO: 1061 - protein, 8 aa, Artificial Sequence
  Synthetic Construct
ISRRSDNL

SEQ ID NO: 1062 - protein, 14 aa, Artificial Sequence
  Synthetic Construct
VRDRETSLMFDFDY

SEQ ID NO: 1063 - protein, 6 aa, Artificial Sequence
  Synthetic Construct
QSIDKY

SEQ ID NO: 1064 - protein, 3 aa, Artificial Sequence
  Synthetic Construct
AAF

SEQ ID NO: 1065 - protein, 9 aa, Artificial Sequence
  Synthetic Construct
QQTYSTRCS

SEQ ID NO: 1066 - protein, 117 aa, Artificial Sequence
  Synthetic Construct
  misc_feature (86)..(86): Xaa can be any naturally occurring amino acid
  misc_feature (88)..(90): Xaa can be any naturally occurring amino acid
VESGGGVVQPGRSLRLSCVASGFTFDNYAMHWVRQAPGKGLEWVSGISRRSDNLDYADSVKGRFTISRDNAKNSLYLQMNSLHQGXIXXXYCVRDRETSLMFDFDYWGQGSLVTVSS

SEQ ID NO: 1067 - protein, 102 aa, Artificial Sequence
  Synthetic Construct
QSPSSLSASVGDSVTITCRASQSIDKYLNWYQQRPGKAPKLLIYAAFSLQSGVPSRFSGSGSGTDFTLTIGGLQPEDIATYYCQQTYSTRCSFGQGTKLEIK

SEQ ID NO: 1068 - protein, 21 aa, Artificial Sequence
  Synthetic Construct
VESGGGVVQPGRSLRLSCVAS

SEQ ID NO: 1069 - protein, 17 aa, Artificial Sequence
  Synthetic Construct
MHWVRQAPGKGLEWVSG

SEQ ID NO: 1070 - protein, 38 aa, Artificial Sequence
  Synthetic Construct
  misc_feature (32)..(32): Xaa can be any naturally occurring amino acid
  misc_feature (34)..(36): Xaa can be any naturally occurring amino acid
DYADSVKGRFTISRDNAKNSLYLQMNSLHQGXIXXXYC

SEQ ID NO: 1071 - protein, 11 aa, Artificial Sequence
  Synthetic Construct
WGQGSLVTVSS

SEQ ID NO: 1072 - protein, 21 aa, Artificial Sequence
  Synthetic Construct
QSPSSLSASVGDSVTITCRAS

SEQ ID NO: 1073 - protein, 17 aa, Artificial Sequence
  Synthetic Construct
LNWYQQRPGKAPKLLIY

SEQ ID NO: 1074 - protein, 36 aa, Artificial Sequence
  Synthetic Construct
SLQSGVPSRFSGSGSGTDFTLTIGGLQPEDIATYYC

SEQ ID NO: 1075 - protein, 10 aa, Artificial Sequence
  Synthetic Construct
FGQGTKLEIK

SEQ ID NO: 1076 - protein, 255 aa, Artificial Sequence
  Synthetic Construct
  misc_feature (86)..(86): Xaa can be any naturally occurring amino acid
  misc_feature (88)..(90): Xaa can be any naturally occurring amino acid
  misc_feature (141)..(141): Xaa can be any naturally occurring amino acid
  misc_feature (211)..(211): Xaa can be any naturally occurring amino acid
VESGGGVVQPGRSLRLSCVASGFTFDNYAMHWVRQAPGKGLEWVSGISRRSDNLDYADSVKGRFTISRDNAKNSLYLQMNSLHQGXIXXXYCVRDRETSLMFDFDYWGQGSLVTVSSKGPSVFPLAPSSKSTSGGTAALGXLVKDYFPEPVTVSWNSGALTSGVHTFPAVLQSSGLYSLSSVVTVPSSSLGTQTYICNVNHKPSNTKVDKXVEPKSCDKTHTCPPCPAPELLGGPSVFLFPPKPKDTLMISRTPE

SEQ ID NO: 1077 - protein, 206 aa, Artificial Sequence
  Synthetic Construct
QSPSSLSASVGDSVTITCRASQSIDKYLNWYQQRPGKAPKLLIYAAFSLQSGVPSRFSGSGSGTDFTLTIGGLQPEDIATYYCQQTYSTRCSFGQGTKLEIKAPSVFIFPPSDEQLKSGTASVVCLLNNFYPREAKVQWKVDNALQSGNSQESVTEQDSKDSTYSLSSTLTLSKADYEKHKVYACEVTHQGLSSPVTKSFNRGECK

SEQ ID NO: 1078 - DNA, 255 bp, Artificial Sequence
  Synthetic Construct
ggtggaatctgggggaggcgtggtacagccgggcaggtccctgagactctcctgtgtcgcctctggattcacctttgataattatgccatgcactgggtccggcaagctccagggaagggcctggagtgggtctcaggtattagtcggagaagtgataaccttgactacgcggactctgtgaagggccgattcaccatctccagagacaatgccaagaactccctgtatctgcaaatgaacagcctccaccaagg

SEQ ID NO: 1079 - DNA, 255 bp, Artificial Sequence
  Synthetic Construct
ccagtctccatcctccctgtctgcatctgtaggagacagcgtcaccatcacttgccgggcaagtcagagcattgataagtatttaaattggtatcaacagagaccaggaaaagcccctaaactcctcatctatgctgcattcagtttacaaagtggagtcccttcaaggttcagtggcagtggatctgggacagatttcactctcaccatcggcggtctgcaacctgaagatattgcaacttactactgtcagca

SEQ ID NO: 1080 - protein, 8 aa, Artificial Sequence
  Synthetic Construct
GFIFDDYS

SEQ ID NO: 1081 - protein, 8 aa, Artificial Sequence
  Synthetic Construct
IKWNGEST

SEQ ID NO: 1082 - protein, 11 aa, Artificial Sequence
  Synthetic Construct
  misc_feature (9)..(9): Xaa can be any naturally occurring amino acid
VKDGGLRYXQH

SEQ ID NO: 1083 - protein, 11 aa, Artificial Sequence
  Synthetic Construct
QSLLHSNGYMY

SEQ ID NO: 1084 - protein, 3 aa, Artificial Sequence
  Synthetic Construct
LGS

SEQ ID NO: 1085 - protein, 8 aa, Artificial Sequence
  Synthetic Construct
MQSLKSFT

SEQ ID NO: 1086 - protein, 116 aa, Artificial Sequence
  Synthetic Construct
  misc_feature (1)..(2): Xaa can be any naturally occurring amino acid
  misc_feature (103)..(103): Xaa can be any naturally occurring amino acid
XXVESGGDVVQPGGSLRLSCAASGFIFDDYSMHWVRQGPGKTLEWVSLIKWNGESTSYADSVKGRFTISRDNTKSALYLEMSNLRPDDTAFYYCVKDGGLRYXQHWGRGTLVTVSS

SEQ ID NO: 1087 - protein, 107 aa, Artificial Sequence
  Synthetic Construct
TQSPLSLPVTPGEPASISCRSSQSLLHSNGYMYLDWYLQKPGQSPRLLIYLGSNRASGVPDRFSGSGSGTDFTLKISRVEAEDVGVYFCMQSLKSFTFGPGTKVDIK

SEQ ID NO: 1088 - protein, 23 aa, Artificial Sequence
  Synthetic Construct
  misc_feature (1)..(2): Xaa can be any naturally occurring amino acid
XXVESGGDVVQPGGSLRLSCAAS

SEQ ID NO: 1089 - protein, 17 aa, Artificial Sequence
  Synthetic Construct
MHWVRQGPGKTLEWVSL

SEQ ID NO: 1090 - protein, 38 aa, Artificial Sequence
  Synthetic Construct
SYADSVKGRFTISRDNTKSALYLEMSNLRPDDTAFYYC

SEQ ID NO: 1091 - protein, 11 aa, Artificial Sequence
  Synthetic Construct
WGRGTLVTVSS

SEQ ID NO: 1092 - protein, 22 aa, Artificial Sequence
  Synthetic Construct
TQSPLSLPVTPGEPASISCRSS

SEQ ID NO: 1093 - protein, 17 aa, Artificial Sequence
  Synthetic Construct
LDWYLQKPGQSPRLLIY

SEQ ID NO: 1094 - protein, 36 aa, Artificial Sequence
  Synthetic Construct
NRASGVPDRFSGSGSGTDFTLKISRVEAEDVGVYFC

SEQ ID NO: 1095 - protein, 10 aa, Artificial Sequence
  Synthetic Construct
FGPGTKVDIK

SEQ ID NO: 1096 - protein, 255 aa, Artificial Sequence
  Synthetic Construct
  misc_feature (1)..(2): Xaa can be any naturally occurring amino acid
  misc_feature (103)..(103): Xaa can be any naturally occurring amino acid
  misc_feature (140)..(140): Xaa can be any naturally occurring amino acid
  misc_feature (210)..(210): Xaa can be any naturally occurring amino acid
XXVESGGDVVQPGGSLRLSCAASGFIFDDYSMHWVRQGPGKTLEWVSLIKWNGESTSYADSVKGRFTISRDNTKSALYLEMSNLRPDDTAFYYCVKDGGLRYXQHWGRGTLVTVSSKGPSVFPLAPSSKSTSGGTAALGXLVKDYFPEPVTVSWNSGALTSGVHTFPAVLQSSGLYSLSSVVTVPSSSLGTQTYICNVNHKPSNTKVDKXVEPKSCDKTHTCPPCPAPELLGGPSVFLFPPKPKDTLMISRTPEV

SEQ ID NO: 1097 - protein, 211 aa, Artificial Sequence
  Synthetic Construct
TQSPLSLPVTPGEPASISCRSSQSLLHSNGYMYLDWYLQKPGQSPRLLIYLGSNRASGVPDRFSGSGSGTDFTLKISRVEAEDVGVYFCMQSLKSFTFGPGTKVDIKAPSVFIFPPSDEQLKSGTASVVCLLNNFYPREAKVQWKVDNALQSGNSQESVTEQDSKDSTYSLSSTLTLSKADYEKHKVYACEVTHQGLSSPVTKSFNRGECK

SEQ ID NO: 1098 - DNA, 255 bp, Artificial Sequence
  Synthetic Construct
  misc_feature (4)..(4): n is a, c, g, t or u
  misc_feature (6)..(8): n is a, c, g, t or u
ccangnnngtggaatcggggggagacgtggttcagcctggggggtccctgagactctcctgtgcagcctctggattcatctttgatgattactccatgcactgggtccgtcaaggtccggggaagactctggagtgggtctctctcataaaatggaatggtgaaagcacttcctacgcagactctgtgaagggtcgattcaccatctccagagacaacaccaaaagcgccctttatctggaaatgagcaatctga

SEQ ID NO: 1099 - DNA, 255 bp, Artificial Sequence
  Synthetic Construct
agactcagtctccactctccctgcccgtcacccctggagagccggcctccatctcctgcaggtctagtcagagcctcctgcatagtaatggatacatgtatttggattggtacctgcaaaagccagggcagtctccacgcctcctgatctatttgggttctaatcgggcctccggggtccctgacaggttcagtggcagtggatcaggcacagattttacactgaaaatcagcagagtggaggctgaggatgttg

SEQ ID NO: 1100 - protein, 8 aa, Artificial Sequence
  Synthetic Construct
GFTFDDFT

SEQ ID NO: 1101 - protein, 8 aa, Artificial Sequence
  Synthetic Construct
INWDGRRT

SEQ ID NO: 1102 - protein, 11 aa, Artificial Sequence
  Synthetic Construct
VKDGGLRYFQY

SEQ ID NO: 1103 - protein, 11 aa, Artificial Sequence
  Synthetic Construct
QSLVHRNGYNY

SEQ ID NO: 1104 - protein, 3 aa, Artificial Sequence
  Synthetic Construct
LGS

SEQ ID NO: 1105 - protein, 8 aa, Artificial Sequence
  Synthetic Construct
MQSLETFT

SEQ ID NO: 1106 - protein, 117 aa, Artificial Sequence
  Synthetic Construct
  misc_feature (3)..(3): Xaa can be any naturally occurring amino acid
ARXVESGGVVVQPGGSLRLLCAASGFTFDDFTMHWVRQSPGKGLEWVSLINWDGRRTEYADSVKGRFSISRDSSQNSLYLQMNSLKTEDTALYYCVKDGGLRYFQYWGRGTLVTVSS

SEQ ID NO: 1107 - protein, 107 aa, Artificial Sequence
  Synthetic Construct
TQSPLSLPVTPGEPASISCRSSQSLVHRNGYNYLDWYLQKPGQSPQLLIYLGSKRASGVPDRFSGSGSGTDFTLKISRVEAEDVGVYYCMQSLETFTFGPGTKVEIK

SEQ ID NO: 1108 - protein, 24 aa, Artificial Sequence
  Synthetic Construct
  misc_feature (3)..(3): Xaa can be any naturally occurring amino acid
ARXVESGGVVVQPGGSLRLLCAAS

SEQ ID NO: 1109 - protein, 17 aa, Artificial Sequence
  Synthetic Construct
MHWVRQSPGKGLEWVSL

SEQ ID NO: 1110 - protein, 38 aa, Artificial Sequence
  Synthetic Construct
EYADSVKGRFSISRDSSQNSLYLQMNSLKTEDTALYYC

SEQ ID NO: 1111 - protein, 11 aa, Artificial Sequence
  Synthetic Construct
WGRGTLVTVSS

SEQ ID NO: 1112 - protein, 22 aa, Artificial Sequence
  Synthetic Construct
TQSPLSLPVTPGEPASISCRSS

SEQ ID NO: 1113 - protein, 17 aa, Artificial Sequence
  Synthetic Construct
LDWYLQKPGQSPQLLIY

SEQ ID NO: 1114 - protein, 36 aa, Artificial Sequence; identical to SEQ ID NO: 195
  Synthetic Construct

SEQ ID NO: 1115 - protein, 10 aa, Artificial Sequence
  Synthetic Construct
FGPGTKVEIK

SEQ ID NO: 1116 - protein, 255 aa, Artificial Sequence
  Synthetic Construct
  misc_feature (3)..(3): Xaa can be any naturally occurring amino acid
  misc_feature (141)..(141): Xaa can be any naturally occurring amino acid
  misc_feature (211)..(211): Xaa can be any naturally occurring amino acid
ARXVESGGVVVQPGGSLRLLCAASGFTFDDFTMHWVRQSPGKGLEWVSLINWDGRRTEYADSVKGRFSISRDSSQNSLYLQMNSLKTEDTALYYCVKDGGLRYFQYWGRGTLVTVSSKGPSVFPLAPSSKSTSGGTAALGXLVKDYFPEPVTVSWNSGALTSGVHTFPAVLQSSGLYSLSSVVTVPSSSLGTQTYICNVNHKPSNTKVDKXVEPKSCDKTHTCPPCPAPELLGGPSVFLFPPKPKDTLMISRTPE

SEQ ID NO: 1117 - protein, 211 aa, Artificial Sequence
  Synthetic Construct
TQSPLSLPVTPGEPASISCRSSQSLVHRNGYNYLDWYLQKPGQSPQLLIYLGSKRASGVPDRFSGSGSGTDFTLKISRVEAEDVGVYYCMQSLETFTFGPGTKVEIKAPSVFIFPPSDEQLKSGTASVVCLLNNFYPREAKVQWKVDNALQSGNSQESVTEQDSKDSTYSLSSTLTLSKADYEKHKVYACEVTHQGLSSPVTKSFNRGECK

SEQ ID NO: 1118 - DNA, 255 bp, Artificial Sequence
  Synthetic Construct
  misc_feature (8)..(10): n is a, c, g, t or u
tgccaggnnngtggagtctgggggagtcgtggtacagccgggggggtccctgagactcttgtgtgcagcctctggattcacctttgatgattttaccatgcactgggtccgacaaagtccggggaagggtctcgagtgggtctcccttattaattgggatggtcgcagaacagaatatgcagactctgtgaagggccgattttccatctccagagacagcagccaaaactccctctatctacaaatgaacagtct

SEQ ID NO: 1119 - DNA, 255 bp, Artificial Sequence
  Synthetic Construct
gactcagtctccgctctccctgcccgtcacccctggagagccggcctccatctcctgcaggtctagtcagagcctcgtgcatagaaatggatacaactacttggattggtacctgcagaagccagggcagtctccacagctcctgatctatttgggttctaagcgagcctccggggtccctgacaggttcagtggcagtggatcaggcacagattttacactgaaaatcagcagagtggaggctgaggatgttgg

SEQ ID NO: 1120 - protein, 8 aa, Artificial Sequence
  Synthetic Construct
GYTLTRYD

SEQ ID NO: 1121 - protein, 8 aa, Artificial Sequence
  Synthetic Construct
MNPKSGGS

SEQ ID NO: 1122 - protein, 8 aa, Artificial Sequence
  Synthetic Construct
ARAVDLDN

SEQ ID NO: 1123 - protein, 12 aa, Artificial Sequence
  Synthetic Construct
QSLLDTSNNNNY

SEQ ID NO: 1124 - protein, 3 aa, Artificial Sequence
  Synthetic Construct
WAS

SEQ ID NO: 1125 - protein, 9 aa, Artificial Sequence
  Synthetic Construct
LQYYSLPHT

SEQ ID NO: 1126 - protein, 114 aa, Artificial Sequence
  Synthetic Construct
  misc_feature (3)..(3): Xaa can be any naturally occurring amino acid
VQXVQSGAEVKKPGASVKVSCKASGYTLTRYDINWVRQATGQGLEWMGWMNPKSGGSGSAQRFQGRVTMTWNNSISTAYMELSTLRSDDTAVYYCARAVDLDNWGQGTLVIVSS

SEQ ID NO: 1127 - protein, 109 aa, Artificial Sequence
  Synthetic Construct
TQSPDSLPVSLGERATINCKSSQSLLDTSNNNNYLGWYQQKPGQPPKLLFYWASARESGVPDRFSGGGSGTDFTLTISSLQAEDVAVYYCLQYYSLPHTFGGGTKVEIK

SEQ ID NO: 1128 - protein, 24 aa, Artificial Sequence
  Synthetic Construct
  misc_feature (3)..(3): Xaa can be any naturally occurring amino acid
VQXVQSGAEVKKPGASVKVSCKAS

SEQ ID NO: 1129 - protein, 17 aa, Artificial Sequence
  Synthetic Construct
INWVRQATGQGLEWMGW

SEQ ID NO: 1130 - protein, 38 aa, Artificial Sequence
  Synthetic Construct
GSAQRFQGRVTMTWNNSISTAYMELSTLRSDDTAVYYC

SEQ ID NO: 1131 - protein, 11 aa, Artificial Sequence
  Synthetic Construct
WGQGTLVIVSS

SEQ ID NO: 1132 - protein, 22 aa, Artificial Sequence
  Synthetic Construct
TQSPDSLPVSLGERATINCKSS

SEQ ID NO: 1133 - protein, 17 aa, Artificial Sequence
  Synthetic Construct
LGWYQQKPGQPPKLLFY

SEQ ID NO: 1134 - protein, 36 aa, Artificial Sequence
  Synthetic Construct
ARESGVPDRFSGGGSGTDFTLTISSLQAEDVAVYYC

SEQ ID NO: 1135 - protein, 10 aa, Artificial Sequence
  Synthetic Construct
FGGGTKVEIK

SEQ ID NO: 1136 - protein, 255 aa, Artificial Sequence
  Synthetic Construct
  misc_feature (3)..(3): Xaa can be any naturally occurring amino acid
  misc_feature (138)..(138): Xaa can be any naturally occurring amino acid
  misc_feature (208)..(208): Xaa can be any naturally occurring amino acid
VQXVQSGAEVKKPGASVKVSCKASGYTLTRYDINWVRQATGQGLEWMGWMNPKSGGSGSAQRFQGRVTMTWNNSISTAYMELSTLRSDDTAVYYCARAVDLDNWGQGTLVIVSSKGPSVFPLAPSSKSTSGGTAALGXLVKDYFPEPVTVSWNSGALTSGVHTFPAVLQSSGLYSLSSVVTVPSSSLGTQTYICNVNHKPSNTKVDKXVEPKSCDKTHTCPPCPAPELLGGPSVFLFPPKPKDTLMISRTPEVTC

SEQ ID NO: 1137 - protein, 213 aa, Artificial Sequence
  Synthetic Construct
TQSPDSLPVSLGERATINCKSSQSLLDTSNNNNYLGWYQQKPGQPPKLLFYWASARESGVPDRFSGGGSGTDFTLTISSLQAEDVAVYYCLQYYSLPHTFGGGTKVEIKAPSVFIFPPSDEQLKSGTASVVCLLNNFYPREAKVQWKVDNALQSGNSQESVTEQDSKDSTYSLSSTLTLSKADYEKHKVYACEVTHQGLSSPVTKSFNRGECK

SEQ ID NO: 1138 - DNA, 255 bp, Artificial Sequence
  Synthetic Construct
  misc_feature (8)..(9): n is a, c, g, t or u
gtgcaagnngtgcagtctggggctgaggtgaagaagcctggggcctcagtgaaggtctcctgcaaggcttctggatacaccctcaccagatacgatatcaactgggtacgacaggccactggccaaggacttgagtggatgggatggatgaaccctaaaagtgggggcagtggctctgcacagagattccagggcagagtcaccatgacctggaacaattccataagcacagcctacatggagctgagcaccctg

SEQ ID NO: 1139 - DNA, 255 bp, Artificial Sequence
  Synthetic Construct
agacccagtctccagactccctgcctgtgtctctgggcgagagggccaccatcaactgcaagtccagccagagtcttttagacacctccaacaacaacaactacttaggttggtaccagcagaaaccaggacagcctccaaaattgctcttttactgggcatctgcccgggaatccggggtccctgaccgattcagtggcggcgggtctgggacagatttcactctcaccatcagcagcctgcaggctgaagatg

SEQ ID NO: 1140 - protein, 8 aa, Artificial Sequence
  Synthetic Construct
GFTFDDYT

SEQ ID NO: 1141 - protein, 8 aa, Artificial Sequence
  Synthetic Construct
IRYDGTRR

SEQ ID NO: 1142 - protein, 11 aa, Artificial Sequence
  Synthetic Construct
VKDGGLRYFDY

SEQ ID NO: 1143 - protein, 11 aa, Artificial Sequence
  Synthetic Construct
QSLLHSNGIHY

SEQ ID NO: 1144 - protein, 3 aa, Artificial Sequence
  Synthetic Construct
LGS

SEQ ID NO: 1145 - protein, 8 aa, Artificial Sequence
  Synthetic Construct
MQSLQTFT

SEQ ID NO: 1146 - protein, 118 aa, Artificial Sequence
  Synthetic Construct
  misc_feature (3)..(4): Xaa can be any naturally occurring amino acid
GAXXVESGGDVVQPGGSLRLSCEASGFTFDDYTMHWVRQIPGKSLEWLSLIRYDGTRREYADSVKGRFTISRDNSKNSLFLHMNSLKTDDSGFYYCVKDGGLRYFDYWGQGALVTVSS

SEQ ID NO: 1147 - protein, 107 aa, Artificial Sequence
  Synthetic Construct
TQSPLSLSVTPGEPASISCRSSQSLLHSNGIHYLDWYLQKPGQSPQLLIYLGSKRASGVPDRFSGSGSGTDFTLKISRVEAEDVGVYYCMQSLQTFTFGPGTKVDIK

SEQ ID NO: 1148 - protein, 25 aa, Artificial Sequence
  Synthetic Construct
  misc_feature (3)..(4): Xaa can be any naturally occurring amino acid
GAXXVESGGDVVQPGGSLRLSCEAS

SEQ ID NO: 1149 - protein, 17 aa, Artificial Sequence
  Synthetic Construct
MHWVRQIPGKSLEWLSL

SEQ ID NO: 1150 - protein, 38 aa, Artificial Sequence
  Synthetic Construct
EYADSVKGRFTISRDNSKNSLFLHMNSLKTDDSGFYYC

SEQ ID NO: 1151 - protein, 11 aa, Artificial Sequence
  Synthetic Construct
WGQGALVTVSS

SEQ ID NO: 1152 - protein, 22 aa, Artificial Sequence
  Synthetic Construct
TQSPLSLSVTPGEPASISCRSS

SEQ ID NO: 1153 - protein, 17 aa, Artificial Sequence
  Synthetic Construct
LDWYLQKPGQSPQLLIY

SEQ ID NO: 1154 - protein, 36 aa, Artificial Sequence; identical to SEQ ID NO: 195
  Synthetic Construct

SEQ ID NO: 1155 - protein, 10 aa, Artificial Sequence
  Synthetic Construct
FGPGTKVDIK

SEQ ID NO: 1156 - protein, 255 aa, Artificial Sequence
  Synthetic Construct
  misc_feature (3)..(4): Xaa can be any naturally occurring amino acid
  misc_feature (142)..(142): Xaa can be any naturally occurring amino acid
  misc_feature (212)..(212): Xaa can be any naturally occurring amino acid
GAXXVESGGDVVQPGGSLRLSCEASGFTFDDYTMHWVRQIPGKSLEWLSLIRYDGTRREYADSVKGRFTISRDNSKNSLFLHMNSLKTDDSGFYYCVKDGGLRYFDYWGQGALVTVSSKGPSVFPLAPSSKSTSGGTAALGXLVKDYFPEPVTVSWNSGALTSGVHTFPAVLQSSGLYSLSSVVTVPSSSLGTQTYICNVNHKPSNTKVDKXVEPKSCDKTHTCPPCPAPELLGGPSVFLFPPKPKDTLMISRTP

SEQ ID NO: 1157 - protein, 211 aa, Artificial Sequence
  Synthetic Construct
TQSPLSLSVTPGEPASISCRSSQSLLHSNGIHYLDWYLQKPGQSPQLLIYLGSKRASGVPDRFSGSGSGTDFTLKISRVEAEDVGVYYCMQSLQTFTFGPGTKVDIKAPSVFIFPPSDEQLKSGTASVVCLLNNFYPREAKVQWKVDNALQSGNSQESVTEQDSKDSTYSLSSTLTLSKADYEKHKVYACEVTHQGLSSPVTKSFNRGECK

SEQ ID NO: 1158 - DNA, 255 bp, Artificial Sequence
  Synthetic Construct
  misc_feature (9)..(11): n is a, c, g, t or u
ggtgcccannnggtggagtctgggggagacgtggtgcagcctggggggtccctgagactctcctgtgaagcctctggattcacctttgatgattatactatgcactgggtccgtcaaattccggggaagagtctggagtggctctctcttattcgttacgacgggactaggagagaatatgcagactccgtgaagggtcgattcaccatctccagagacaacagcaaaaactccctgtttctgcacatgaacagt

SEQ ID NO: 1159 - DNA, 255 bp, Artificial Sequence
  Synthetic Construct
agactcagtcaccactctccctgtccgtcacccctggagagccggcctccatctcctgcaggtcaagtcagagcctcctgcacagtaatggaatccactatttggattggtacctgcagaagccagggcagtctccacagctcctgatctatttgggttctaaacgggcctccggggtccctgacaggttcagtggcagtggatcaggcacagattttacactgaaaatcagcagagtggaggctgaggatgttg

SEQ ID NO: 1160 - protein, 8 aa, Artificial Sequence
  Synthetic Construct
GFYIGGSS

SEQ ID NO: 1161 - protein, 10 aa, Artificial Sequence
  Synthetic Construct
IRSFSHAFAT

SEQ ID NO: 1162 - protein, 16 aa, Artificial Sequence
  Synthetic Construct
TRPFRGYDLSSDFYPD

SEQ ID NO: 1163 - protein, 7 aa, Artificial Sequence
  Synthetic Construct
QTISGGS

SEQ ID NO: 1164 - protein, 3 aa, Artificial Sequence
  Synthetic Construct
DAS

SEQ ID NO: 1165 - protein, 9 aa, Artificial Sequence
  Synthetic Construct
QQYSESPQT

SEQ ID NO: 1166 - protein, 111 aa, Artificial Sequence
  Synthetic Construct
GASLKLSCAVSGFYIGGSSIHWVRQTPGRGLEWLGRIRSFSHAFATAYTPSLRGRITISTNESQNTAFLVLTSLSRDDTAIYYCTRPFRGYDLSSDFYPDWGQGTLVTVSS

SEQ ID NO: 1167 - protein, 104 aa, Artificial Sequence
  Synthetic Construct
TQSPGTLSLSPGEGATLSCRASQTISGGSLAWYQQRPGLAPRLLMYDASTRATGIPKRFSGSGSGTDFTLTISRLEPEDFAVYYCQQYSESPQTFGQGTKVEIK

SEQ ID NO: 1168 - protein, 11 aa, Artificial Sequence
  Synthetic Construct
GASLKLSCAVS

SEQ ID NO: 1169 - protein, 17 aa, Artificial Sequence
  Synthetic Construct
IHWVRQTPGRGLEWLGR

SEQ ID NO: 1170 - protein, 38 aa, Artificial Sequence
  Synthetic Construct
AYTPSLRGRITISTNESQNTAFLVLTSLSRDDTAIYYC

SEQ ID NO: 1171 - protein, 11 aa, Artificial Sequence
  Synthetic Construct
WGQGTLVTVSS

SEQ ID NO: 1172 - protein, 22 aa, Artificial Sequence
  Synthetic Construct
TQSPGTLSLSPGEGATLSCRAS

SEQ ID NO: 1173 - protein, 17 aa, Artificial Sequence
  Synthetic Construct
LAWYQQRPGLAPRLLMY

SEQ ID NO: 1174 - protein, 36 aa, Artificial Sequence; identical to SEQ ID NO: 235
  Synthetic Construct

SEQ ID NO: 1175 - protein, 10 aa, Artificial Sequence
  Synthetic Construct
FGQGTKVEIK

SEQ ID NO: 1176 - protein, 255 aa, Artificial Sequence
  Synthetic Construct
  misc_feature (135)..(135): Xaa can be any naturally occurring amino acid
  misc_feature (205)..(205): Xaa can be any naturally occurring amino acid
GASLKLSCAVSGFYIGGSSIHWVRQTPGRGLEWLGRIRSFSHAFATAYTPSLRGRITISTNESQNTAFLVLTSLSRDDTAIYYCTRPFRGYDLSSDFYPDWGQGTLVTVSSKGPSVFPLAPSSKSTSGGTAALGXLVKDYFPEPVTVSWNSGALTSGVHTFPAVLQSSGLYSLSSVVTVPSSSLGTQTYICNVNHKPSNTKVDKXVEPKSCDKTHTCPPCPAPELLGGPSVFLFPPKPKDTLMISRTPEVTCVVV

SEQ ID NO: 1177 - protein, 208 aa, Artificial Sequence
  Synthetic Construct
TQSPGTLSLSPGEGATLSCRASQTISGGSLAWYQQRPGLAPRLLMYDASTRATGIPKRFSGSGSGTDFTLTISRLEPEDFAVYYCQQYSESPQTFGQGTKVEIKAPSVFIFPPSDEQLKSGTASVVCLLNNFYPREAKVQWKVDNALQSGNSQESVTEQDSKDSTYSLSSTLTLSKADYEKHKVYACEVTHQGLSSPVTKSFNRGECK

SEQ ID NO: 1178 - DNA, 255 bp, Artificial Sequence
  Synthetic Construct
ggtgcatccctcaaactctcctgtgcagtgtcgggattctacattggcggctcgtccatacactgggtccgccagactcccgggagagggctggagtggcttggccgaataagaagcttttctcacgcttttgcgacggcctatactccgtcgctgaggggcaggatcaccatttccacaaatgagtcgcagaacacggcctttttggtgctgaccagcctgagtcgggacgacacggccatttactactgtact

SEQ ID NO: 1179 - DNA, 255 bp, Artificial Sequence
  Synthetic Construct
gacgcagtctccaggcaccctgtctttgtctccaggggaaggcgccaccctctcatgtagggccagtcagactattagtggcggctctttagcctggtatcaacaaagacctggcctggcgcccaggctcctcatgtatgacgcgtccaccagggccactggcatcccaaagagattcagtggcagtgggtccgggacagacttcacgctcacaattagcagactggagcctgaagattttgcagtatattactg

SEQ ID NO: 1180 - protein, 8 aa, Artificial Sequence
  Synthetic Construct
GFTLTTYA

SEQ ID NO: 1181 - protein, 8 aa, Artificial Sequence
  Synthetic Construct
MSKDGSAT

SEQ ID NO: 1182 - protein, 19 aa, Artificial Sequence
  Synthetic Construct
ARDTQDWPTLPHHFYGMDV

SEQ ID NO: 1183 - protein, 6 aa, Artificial Sequence
  Synthetic Construct
QDIKNY

SEQ ID NO: 1184 - protein, 3 aa, Artificial Sequence
  Synthetic Construct
DAS

SEQ ID NO: 1185 - protein, 9 aa, Artificial Sequence
  Synthetic Construct
QQYDNLPLT

SEQ ID NO: 1186 - protein, 125 aa, Artificial Sequence
  Synthetic Construct
  misc_feature (2)..(3): Xaa can be any naturally occurring amino acid
WXXVESGGGVVQPGRSLTISCEVSGFTLTTYAVHWVRQAPGKGLEWVAVMSKDGSATYYAGSVRGRFTISRDISKKMMYLEMNSLRGEDTGVYYCARDTQDWPTLPHHFYGMDVWGQGTTVIVSS

SEQ ID NO: 1187 - protein, 107 aa, Artificial Sequence
  Synthetic Construct
DIVMTQSPSSLSASVGDRVTITCQASQDIKNYLNWYQQKPGKPPKFLIYDASSLETGVPSRFSGSGSGTDFTLTINSLQPEDIATYYCQQYDNLPLTFGGGTKVEIK

SEQ ID NO: 1188 - protein, 24 aa, Artificial Sequence
  Synthetic Construct
  misc_feature (2)..(3): Xaa can be any naturally occurring amino acid
WXXVESGGGVVQPGRSLTISCEVS

SEQ ID NO: 1189 - protein, 17 aa, Artificial Sequence
  Synthetic Construct
VHWVRQAPGKGLEWVAV

SEQ ID NO: 1190 - protein, 38 aa, Artificial Sequence
  Synthetic Construct
YYAGSVRGRFTISRDISKKMMYLEMNSLRGEDTGVYYC

SEQ ID NO: 1191 - protein, 11 aa, Artificial Sequence
  Synthetic Construct
WGQGTTVIVSS

SEQ ID NO: 1192 - protein, 26 aa, Artificial Sequence
  Synthetic Construct
DIVMTQSPSSLSASVGDRVTITCQAS

SEQ ID NO: 1193 - protein, 17 aa, Artificial Sequence
  Synthetic Construct
LNWYQQKPGKPPKFLIY

SEQ ID NO: 1194 - protein, 36 aa, Artificial Sequence
  Synthetic Construct
SLETGVPSRFSGSGSGTDFTLTINSLQPEDIATYYC

SEQ ID NO: 1195 - protein, 10 aa, Artificial Sequence
  Synthetic Construct
FGGGTKVEIK

SEQ ID NO: 1196 - protein, 255 aa, Artificial Sequence
  Synthetic Construct
  misc_feature (2)..(3): Xaa can be any naturally occurring amino acid
  misc_feature (149)..(149): Xaa can be any naturally occurring amino acid
  misc_feature (219)..(219): Xaa can be any naturally occurring amino acid
WXXVESGGGVVQPGRSLTISCEVSGFTLTTYAVHWVRQAPGKGLEWVAVMSKDGSATYYAGSVRGRFTISRDISKKMMYLEMNSLRGEDTGVYYCARDTQDWPTLPHHFYGMDVWGQGTTVIVSSKGPSVFPLAPSSKSTSGGTAALGXLVKDYFPEPVTVSWNSGALTSGVHTFPAVLQSSGLYSLSSVVTVPSSSLGTQTYICNVNHKPSNTKVDKXVEPKSCDKTHTCPPCPAPELLGGPSVFLFPPKPKDT

SEQ ID NO: 1197 - protein, 211 aa, Artificial Sequence
  Synthetic Construct
DIVMTQSPSSLSASVGDRVTITCQASQDIKNYLNWYQQKPGKPPKFLIYDASSLETGVPSRFSGSGSGTDFTLTINSLQPEDIATYYCQQYDNLPLTFGGGTKVEIKAPSVFIFPPSDEQLKSGTASVVCLLNNFYPREAKVQWKVDNALQSGNSQESVTEQDSKDSTYSLSSTLTLSKADYEKHKVYACEVTHQGLSSPVTKSFNRGECK

SEQ ID NO: 1198 - DNA, 255 bp, Artificial Sequence
  Synthetic Construct
  misc_feature (5)..(10): n is a, c, g, t or u
  misc_feature (13)..(13): n is a, c, g, t or u
gtggnnnnnngtngagtctgggggaggcgtggtccagcctgggaggtccctgacaatctcctgtgaagtctctggattcaccctcacaacttatgctgtccactgggtccgccaggctccaggcaaggggctggagtgggtggcagttatgtcaaaagatggaagcgcgacatattatgcaggctccgtgaggggccgattcaccatctccagagacatttccaagaaaatgatgtatttggaaatgaacagcct

SEQ ID NO: 1199 - DNA, 255 bp, Artificial Sequence
  Synthetic Construct
gacatcgtgatgacccagtctccatcctccctgtctgcatctgtaggagacagagtcaccatcacttgccaggcgagtcaagacattaagaactatttaaattggtatcagcagaaaccagggaaaccccctaagttcctcatctacgatgcatccagtttggaaacgggggtcccatcaaggttcagtggaagtggatctgggacagattttactctcaccatcaacagcctgcagcctgaagatattgcaaca

SEQ ID NO: 1200 - protein, 8 aa, Artificial Sequence
  Synthetic Construct
GFTFDDYT

SEQ ID NO: 1201 - protein, 8 aa, Artificial Sequence
  Synthetic Construct
ISWKNHSL

SEQ ID NO: 1202 - protein, 11 aa, Artificial Sequence
  Synthetic Construct
AKDNGFRSFDS

SEQ ID NO: 1203 - protein, 11 aa, Artificial Sequence
  Synthetic Construct
QSLLHSNGYKY

SEQ ID NO: 1204 - protein, 3 aa, Artificial Sequence
  Synthetic Construct
MGS

SEQ ID NO: 1205 - protein, 9 aa, Artificial Sequence
  Synthetic Construct
MQALQTPWT

SEQ ID NO: 1206 - protein, 117 aa, Artificial Sequence
  Synthetic Construct
  misc_feature (2)..(4): Xaa can be any naturally occurring amino acid
  misc_feature (16)..(16): Xaa can be any naturally occurring amino acid
CXXXESGGGLVQPGRXLRLSCAASGFTFDDYTMHWVRQVPGKGLEWVSGISWKNHSLGYADSVKGRFTISRDNAKNSLYLQMNSLRSEDTALYYCAKDNGFRSFDSWGQGTLVTVSS

SEQ ID NO: 1207 - protein, 108 aa, Artificial Sequence
  Synthetic Construct
TQSPLSLAVTPGEPASISCRSSQSLLHSNGYKYLDWYLQKPGQSPQLLIYMGSNRASGVPDRFSVSGSGTDFTLKISRVEAADVGVYYCMQALQTPWTFGQGTKVEIK

SEQ ID NO: 1208 - protein, 24 aa, Artificial Sequence
  Synthetic Construct
  misc_feature (2)..(4): Xaa can be any naturally occurring amino acid
  misc_feature (16)..(16): Xaa can be any naturally occurring amino acid
CXXXESGGGLVQPGRXLRLSCAAS

SEQ ID NO: 1209 - protein, 17 aa, Artificial Sequence
  Synthetic Construct
MHWVRQVPGKGLEWVSG

SEQ ID NO: 1210 - protein, 38 aa, Artificial Sequence
  Synthetic Construct
GYADSVKGRFTISRDNAKNSLYLQMNSLRSEDTALYYC

SEQ ID NO: 1211 - protein, 11 aa, Artificial Sequence
  Synthetic Construct
WGQGTLVTVSS

SEQ ID NO: 1212 - protein, 22 aa, Artificial Sequence
  Synthetic Construct
TQSPLSLAVTPGEPASISCRSS

SEQ ID NO: 1213 - protein, 17 aa, Artificial Sequence
  Synthetic Construct
LDWYLQKPGQSPQLLIY

SEQ ID NO: 1214 - protein, 36 aa, Artificial Sequence
  Synthetic Construct
NRASGVPDRFSVSGSGTDFTLKISRVEAADVGVYYC

SEQ ID NO: 1215 - protein, 10 aa, Artificial Sequence
  Synthetic Construct
FGQGTKVEIK

SEQ ID NO: 1216 - protein, 255 aa, Artificial Sequence
  Synthetic Construct
  misc_feature (2)..(4): Xaa can be any naturally occurring amino acid
  misc_feature (16)..(16): Xaa can be any naturally occurring amino acid
  misc_feature (141)..(141): Xaa can be any naturally occurring amino acid
  misc_feature (211)..(211): Xaa can be any naturally occurring amino acid
CXXXESGGGLVQPGRXLRLSCAASGFTFDDYTMHWVRQVPGKGLEWVSGISWKNHSLGYADSVKGRFTISRDNAKNSLYLQMNSLRSEDTALYYCAKDNGFRSFDSWGQGTLVTVSSKGPSVFPLAPSSKSTSGGTAALGXLVKDYFPEPVTVSWNSGALTSGVHTFPAVLQSSGLYSLSSVVTVPSSSLGTQTYICNVNHKPSNTKVDKXVEPKSCDKTHTCPPCPAPELLGGPSVFLFPPKPKDTLMISRTPE

SEQ ID NO: 1217 - protein, 212 aa, Artificial Sequence
  Synthetic Construct
TQSPLSLAVTPGEPASISCRSSQSLLHSNGYKYLDWYLQKPGQSPQLLIYMGSNRASGVPDRFSVSGSGTDFTLKISRVEAADVGVYYCMQALQTPWTFGQGTKVEIKAPSVFIFPPSDEQLKSGTASVVCLLNNFYPREAKVQWKVDNALQSGNSQESVTEQDSKDSTYSLSSTLTLSKADYEKHKVYACEVTHQGLSSPVTKSFNRGECK

SEQ ID NO: 1218 - DNA, 255 bp, Artificial Sequence
  Synthetic Construct
  misc_feature (7)..(12): n is a, c, g, t or u
gtgccannnnnnggagtctgggggaggcttggttcagcctggcaggtscctgagactctcctgtgcagcctctggattcacctttgatgattataccatgcactgggtccggcaagttccagggaagggcctggagtgggtctcaggtattagttggaagaatcacagtctaggctatgcggactctgtgaagggccgattcaccatctccagagacaacgccaagaactccctatatctgcaaatgaacagtct

SEQ ID NO: 1219 - DNA, 255 bp, Artificial Sequence
  Synthetic Construct
gactcagtctccactctccctggccgtcacccctggagagccggcctccatctcctgcaggtctagtcagagcctcctgcatagtaatggatacaagtatttggattggtacctgcagaagccagggcagtctccacagctcctgatctatatgggttctaaccgggcctccggggtccctgacaggttcagtgtcagtgggtcaggcacagattttacactgaaaatcagcagagtggaggctgcggatgttgg

SEQ ID NO: 1220 - protein, 8 aa, Artificial Sequence
  Synthetic Construct
GFVFDDYS

SEQ ID NO: 1221 - protein, 8 aa, Artificial Sequence
  Synthetic Construct
ISWDGGRT

SEQ ID NO: 1222 - protein, 11 aa, Artificial Sequence
  Synthetic Construct
VKDTGLRSFDS

SEQ ID NO: 1223 - protein, 11 aa, Artificial Sequence
  Synthetic Construct
QSLMHTNGYIY

SEQ ID NO: 1224 - protein, 3 aa, Artificial Sequence
  Synthetic Construct
LGS

SEQ ID NO: 1225 - protein, 8 aa, Artificial Sequence
  Synthetic Construct
MQALQSWT

SEQ ID NO: 1226 - protein, 113 aa, Artificial Sequence
  Synthetic Construct
ESGGEVVQPGRSLRLSCAASGFVFDDYSMHWVRQVPGKGLEWVALISWDGGRTSYGHSVKGRFTISRDNTKDSLFLQMNSLRPEDTALYYCVKDTGLRSFDSWGQGILVTVSS

SEQ ID NO: 1227 - protein, 111 aa, Artificial Sequence
  Synthetic Construct
  misc_feature (2)..(4): Xaa can be any naturally occurring amino acid
MXXXTQSPLSLPVTPGEPASISCRSSQSLMHTNGYIYLDWYLQKPGQSPQLLIYLGSKRAPGVPDRFSGSGSGTDFTLKISRVEAEDVGVYYCMQALQSWTFGQGTKVEIK

SEQ ID NO: 1228 - protein, 20 aa, Artificial Sequence
  Synthetic Construct
ESGGEVVQPGRSLRLSCAAS

SEQ ID NO: 1229 - protein, 17 aa, Artificial Sequence
  Synthetic Construct
MHWVRQVPGKGLEWVAL

SEQ ID NO: 1230 - protein, 38 aa, Artificial Sequence
  Synthetic Construct
SYGHSVKGRFTISRDNTKDSLFLQMNSLRPEDTALYYC

SEQ ID NO: 1231 - protein, 11 aa, Artificial Sequence
  Synthetic Construct
WGQGILVTVSS

SEQ ID NO: 1232 - protein, 26 aa, Artificial Sequence
  Synthetic Construct
  misc_feature (2)..(4): Xaa can be any naturally occurring amino acid
MXXXTQSPLSLPVTPGEPASISCRSS

SEQ ID NO: 1233 - protein, 17 aa, Artificial Sequence
  Synthetic Construct
LDWYLQKPGQSPQLLIY

SEQ ID NO: 1234 - protein, 36 aa, Artificial Sequence
  Synthetic Construct
KRAPGVPDRFSGSGSGTDFTLKISRVEAEDVGVYYC

SEQ ID NO: 1235 - protein, 10 aa, Artificial Sequence
  Synthetic Construct
FGQGTKVEIK

SEQ ID NO: 1236 - protein, 255 aa, Artificial Sequence
  Synthetic Construct
  misc_feature (137)..(137): Xaa can be any naturally occurring amino acid
  misc_feature (207)..(207): Xaa can be any naturally occurring amino acid
ESGGEVVQPGRSLRLSCAASGFVFDDYSMHWVRQVPGKGLEWVALISWDGGRTSYGHSVKGRFTISRDNTKDSLFLQMNSLRPEDTALYYCVKDTGLRSFDSWGQGILVTVSSKGPSVFPLAPSSKSTSGGTAALGXLVKDYFPEPVTVSWNSGALTSGVHTFPAVLQSSGLYSLSSVVTVPSSSLGTQTYICNVNHKPSNTKVDKXVEPKSCDKTHTCPPCPAPELLGGPSVFLFPPKPKDTLMISRTPEVTCV

SEQ ID NO: 1237 - protein, 215 aa, Artificial Sequence
  Synthetic Construct
  misc_feature (2)..(4): Xaa can be any naturally occurring amino acid
MXXXTQSPLSLPVTPGEPASISCRSSQSLMHTNGYIYLDWYLQKPGQSPQLLIYLGSKRAPGVPDRFSGSGSGTDFTLKISRVEAEDVGVYYCMQALQSWTFGQGTKVEIKAPSVFIFPPSDEQLKSGTASVVCLLNNFYPREAKVQWKVDNALQSGNSQESVTEQDSKDSTYSLSSTLTLSKADYEKHKVYACEVTHQGLSSPVTKSFNRGECK

SEQ ID NO: 1238 - DNA, 255 bp, Artificial Sequence
  Synthetic Construct
tggagtctggcggagaggtcgtacagccggggaggtccctgaggctgtcctgtgcagcctctggattcgtctttgatgattattccatgcactgggtccgtcaagtcccggggaagggccttgagtgggtcgctctaattagttgggatggtggtcgcacatcctatggacactctgtgaagggccgattcaccatctccagagacaacaccaaggactccctgtttctgcaaatgaacagtctgagacccgagg

SEQ ID NO: 1239 - DNA, 255 bp, Artificial Sequence
  Synthetic Construct
  misc_feature (6)..(6): n is a, c, g, t or u
  misc_feature (8)..(10): n is a, c, g, t or u
atgttngnnnagactcagtctccactctccctgcccgtcactcctggagagccggcctccatctcctgcaggtctagtcagagcctcatgcatactaatggatacatctatttggattggtacctgcagaagcctgggcagtctccacagctcctgatctatctgggttctaagcgggcccccggggtccccgacaggttcagtggcagtggatcaggcacagattttacactgaaaatcagcagagtggaggct

SEQ ID NO: 1240 - protein, 8 aa, Artificial Sequence
  Synthetic Construct
GFTFSHAS

SEQ ID NO: 1241 - protein, 10 aa, Artificial Sequence
  Synthetic Construct
IRSKTDGGTT

SEQ ID NO: 1242 - protein, 15 aa, Artificial Sequence
  Synthetic Construct
NTHFYCNRSMCYGDY

SEQ ID NO: 1243 - protein, 12 aa, Artificial Sequence
  Synthetic Construct
QSVLYSSNNKNY

SEQ ID NO: 1244 - protein, 3 aa, Artificial Sequence
  Synthetic Construct
WAS

SEQ ID NO: 1245 - protein, 8 aa, Artificial Sequence
  Synthetic Construct
QQYYSGRT

SEQ ID NO: 1246 - protein, 119 aa, Artificial Sequence
  Synthetic Construct
ESGGGLVKPGGSLRLSCAASGFTFSHASMSWVRQAPGKGLEWVGRIRSKTDGGTTDYAAPVKGRFTISRDDSKNTLYLQMNSLKTEDTAVYYCNTHFYCNRSMCYGDYWGQGTLVTVSS

SEQ ID NO: 1247 - protein, 112 aa, Artificial Sequence
  Synthetic Construct
  misc_feature (3)..(4): Xaa can be any naturally occurring amino acid
DIXXTQSPDSLAVSLGERATINCKSSQSVLYSSNNKNYLAWYQQKPGQPPKLLIYWASTRESGVPDRFRGSGSGTDFSLTISSLQAEDVAVYYCQQYYSGRTFGPGTKVDFK

SEQ ID NO: 1248 - protein, 20 aa, Artificial Sequence
  Synthetic Construct
ESGGGLVKPGGSLRLSCAAS

SEQ ID NO: 1249 - protein, 17 aa, Artificial Sequence
  Synthetic Construct
MSWVRQAPGKGLEWVGR

SEQ ID NO: 1250 - protein, 38 aa, Artificial Sequence
  Synthetic Construct
DYAAPVKGRFTISRDDSKNTLYLQMNSLKTEDTAVYYC

SEQ ID NO: 1251 - protein, 11 aa, Artificial Sequence
  Synthetic Construct
WGQGTLVTVSS

SEQ ID NO: 1252 - protein, 26 aa, Artificial Sequence
  Synthetic Construct
  misc_feature (3)..(4): Xaa can be any naturally occurring amino acid
DIXXTQSPDSLAVSLGERATINCKSS

SEQ ID NO: 1253 - protein, 17 aa, Artificial Sequence
  Synthetic Construct
LAWYQQKPGQPPKLLIY

SEQ ID NO: 1254 - protein, 36 aa, Artificial Sequence
  Synthetic Construct
TRESGVPDRFRGSGSGTDFSLTISSLQAEDVAVYYC

SEQ ID NO: 1255 - protein, 10 aa, Artificial Sequence
  Synthetic Construct
FGPGTKVDFK

SEQ ID NO: 1256 - protein, 255 aa, Artificial Sequence
  Synthetic Construct
  misc_feature (143)..(143): Xaa can be any naturally occurring amino acid
  misc_feature (213)..(213): Xaa can be any naturally occurring amino acid
ESGGGLVKPGGSLRLSCAASGFTFSHASMSWVRQAPGKGLEWVGRIRSKTDGGTTDYAAPVKGRFTISRDDSKNTLYLQMNSLKTEDTAVYYCNTHFYCNRSMCYGDYWGQGTLVTVSSKGPSVFPLAPSSKSTSGGTAALGXLVKDYFPEPVTVSWNSGALTSGVHTFPAVLQSSGLYSLSSVVTVPSSSLGTQTYICNVNHKPSNTKVDKXVEPKSCDKTHTCPPCPAPELLGGPSVFLFPPKPKDTLMISRT

SEQ ID NO: 1257 - protein, 216 aa, Artificial Sequence
  Synthetic Construct
  misc_feature (3)..(4): Xaa can be any naturally occurring amino acid
DIXXTQSPDSLAVSLGERATINCKSSQSVLYSSNNKNYLAWYQQKPGQPPKLLIYWASTRESGVPDRFRGSGSGTDFSLTISSLQAEDVAVYYCQQYYSGRTFGPGTKVDFKAPSVFIFPPSDEQLKSGTASVVCLLNNFYPREAKVQWKVDNALQSGNSQESVTEQDSKDSTYSLSSTLTLSKADYEKHKVYACEVTHQGLSSPVTKSFNRGECK

SEQ ID NO: 1258 - DNA, 255 bp, Artificial Sequence
  Synthetic Construct
  misc_feature (2)..(2): n is a, c, g, t or u
tngagtctgggggaggcttggtaaagcctggggggtcccttagactctcctgtgcagcctctggattcactttcagtcacgcctcgatgagctgggtccgccaggctccagggaaggggctggagtgggttggccgtattagaagcaaaactgatggcgggacaacagactacgctgcacccgtgaaaggcagattcaccatctcaagagatgattcaaaaaacacactgtatctgcaaatgaacagcctgaaaa

SEQ ID NO: 1259 - DNA, 255 bp, Artificial Sequence
  Synthetic Construct
  misc_feature (8)..(10): n is a, c, g, t or u
gacatcgnnnagacccagtctccagactccctggctgtgtctctgggcgagagggccaccatcaactgcaagtccagccagagtgttttatacagctccaataataagaattacttagcttggtaccagcagaaaccagggcagcctcctaagttgctcatttactgggcatctacccgggaatccggggtccctgaccgattcagaggcagcgggtctgggacagatttctctctcaccatcagcagcctgcag

SEQ ID NO: 1260 - protein, 8 aa, Artificial Sequence
  Synthetic Construct
GFTFEDYS

SEQ ID NO: 1261 - protein, 8 aa, Artificial Sequence
  Synthetic Construct
ISWDGGRT

SEQ ID NO: 1262 - protein, 11 aa, Artificial Sequence
  Synthetic Construct
VKDTGLRSFDS

SEQ ID NO: 1263 - protein, 11 aa, Artificial Sequence
  Synthetic Construct
QSLVHSNGINY

SEQ ID NO: 1264 - protein, 3 aa, Artificial Sequence
  Synthetic Construct
MGF

SEQ ID NO: 1265 - protein, 8 aa, Artificial Sequence
  Synthetic Construct
MQALQSWT

SEQ ID NO: 1266 - protein, 114 aa, Artificial Sequence
  Synthetic Construct
VESGGVVVQRGGSLRLSCAGSGFTFEDYSMHWVRQSPGKGLEWVSLISWDGGRTSYGDSVKGRFTISRDNSKKSLFLQMTNLRPEDTALYYCVKDTGLRSFDSWGQGTLVTVSS

SEQ ID NO: 1267 - protein, 111 aa, Artificial Sequence
  Synthetic Construct
  misc_feature (2)..(4): Xaa can be any naturally occurring amino acid
MXXXTQSPLSLPVTPGEPASISCRSSQSLVHSNGINYLDWYIQKPGQSPQLLIYMGFKRAAGVPDRFSGSVSGTDFTLMISRVEAEDVGVYYCMQALQSWTFGQGTRVEIK

SEQ ID NO: 1268 - protein, 21 aa, Artificial Sequence
  Synthetic Construct
VESGGVVVQRGGSLRLSCAGS

SEQ ID NO: 1269 - protein, 17 aa, Artificial Sequence
  Synthetic Construct
MHWVRQSPGKGLEWVSL

SEQ ID NO: 1270 - protein, 38 aa, Artificial Sequence
  Synthetic Construct
SYGDSVKGRFTISRDNSKKSLFLQMTNLRPEDTALYYC

SEQ ID NO: 1271 - protein, 11 aa, Artificial Sequence
  Synthetic Construct
WGQGTLVTVSS

SEQ ID NO: 1272 - protein, 26 aa, Artificial Sequence
  Synthetic Construct
  misc_feature (2)..(4): Xaa can be any naturally occurring amino acid
MXXXTQSPLSLPVTPGEPASISCRSS

SEQ ID NO: 1273 - protein, 17 aa, Artificial Sequence
  Synthetic Construct
LDWYIQKPGQSPQLLIY

SEQ ID NO: 1274 - protein, 36 aa, Artificial Sequence
  Synthetic Construct
KRAAGVPDRFSGSVSGTDFTLMISRVEAEDVGVYYC

SEQ ID NO: 1275 - protein, 10 aa, Artificial Sequence
  Synthetic Construct
FGQGTRVEIK

SEQ ID NO: 1276 - protein, 255 aa, Artificial Sequence
  Synthetic Construct
  misc_feature (138)..(138): Xaa can be any naturally occurring amino acid
  misc_feature (208)..(208): Xaa can be any naturally occurring amino acid
VESGGVVVQRGGSLRLSCAGSGFTFEDYSMHWVRQSPGKGLEWVSLISWDGGRTSYGDSVKGRFTISRDNSKKSLFLQMTNLRPEDTALYYCVKDTGLRSFDSWGQGTLVTVSSKGPSVFPLAPSSKSTSGGTAALGXLVKDYFPEPVTVSWNSGALTSGVHTFPAVLQSSGLYSLSSVVTVPSSSLGTQTYICNVNHKPSNTKVDKXVEPKSCDKTHTCPPCPAPELLGGPSVFLFPPKPKDTLMISRTPEVTC

SEQ ID NO: 1277 - protein, 215 aa, Artificial Sequence
  Synthetic Construct
  misc_feature (2)..(4): Xaa can be any naturally occurring amino acid
MXXXTQSPLSLPVTPGEPASISCRSSQSLVHSNGINYLDWYIQKPGQSPQLLIYMGFKRAAGVPDRFSGSVSGTDFTLMISRVEAEDVGVYYCMQALQSWTFGQGTRVEIKAPSVFIFPPSDEQLKSGTASVVCLLNNFYPREAKVQWKVDNALQSGNSQESVTEQDSKDSTYSLSSTLTLSKADYEKHKVYACEVTHQGLSSPVTKSFNRGECK

SEQ ID NO: 1278 - DNA, 255 bp, Artificial Sequence
  Synthetic Construct
gtggagtctggcggagtcgtggtacagcggggggggtccctgagactctcctgtgcaggctctggattcacctttgaggattattccatgcactgggtccgtcaatctccggggaagggtcttgagtgggtctctcttattagttgggatggtggccggacatcctatggagactctgtgaaggggcggttcaccatctccagagacaacagcaagaagtccctgtttctgcaaatgaccaatctgagacccgaa

SEQ ID NO: 1279 - DNA, 255 bp, Artificial Sequence
  Synthetic Construct
  misc_feature (6)..(6): n is a, c, g, t or u
  misc_feature (8)..(9): n is a, c, g, t or u
  misc_feature (11)..(11): n is a, c, g, t or u
atgttngnngngactcagtctcctctctccctgcccgtcacccctggagagccggcctccatctcctgtcggtctagtcagagcctcgtgcatagtaatggaatcaactatttggactggtacatccagaagccagggcagtctccacaactcctgatctatatgggttttaagcgggccgccggggtccctgacaggttcagtggcagtgtctcaggcacagattttacactgatgatcagcagagtggaggct

SEQ ID NO: 1280 - protein, 8 aa, Artificial Sequence
  Synthetic Construct
GFIFDDYS

SEQ ID NO: 1281 - protein, 8 aa, Artificial Sequence
  Synthetic Construct
ISWDGGRT

SEQ ID NO: 1282 - protein, 11 aa, Artificial Sequence
  Synthetic Construct
VKDTGLRSFDS

SEQ ID NO: 1283 - protein, 11 aa, Artificial Sequence
  Synthetic Construct
QSLVHSNGYTY

SEQ ID NO: 1284 - protein, 3 aa, Artificial Sequence
  Synthetic Construct
MGS

SEQ ID NO: 1285 - protein, 8 aa, Artificial Sequence
  Synthetic Construct
MQALQSWT

SEQ ID NO: 1286 - protein, 113 aa, Artificial Sequence
  Synthetic Construct
ESGGEVVQPGGSLRLSCVASGFIFDDYSMHWVRQVPGKGLEWVSLISWDGGRTSYGDSVKGRFTISRDNNKKTLFLQMNSLRPEDTALYYCVKDTGLRSFDSWGQGILVTVSS

SEQ ID NO: 1287 - protein, 111 aa, Artificial Sequence
  Synthetic Construct
  misc_feature (3)..(3): Xaa can be any naturally occurring amino acid
DVXETQSPLSLPVTPGEPASISCRSSQSLVHSNGYTYLDWYLQRPGQSPQLLIYMGSKRASGVPDRFSGSFSGTDFTLKISRVEAEDVGVYYCMQALQSWTFGLGTKVEIK

SEQ ID NO: 1288 - protein, 20 aa, Artificial Sequence
  Synthetic Construct
ESGGEVVQPGGSLRLSCVAS

SEQ ID NO: 1289 - protein, 17 aa, Artificial Sequence
  Synthetic Construct
MHWVRQVPGKGLEWVSL

SEQ ID NO: 1290 - protein, 38 aa, Artificial Sequence
  Synthetic Construct
SYGDSVKGRFTISRDNNKKTLFLQMNSLRPEDTALYYC

SEQ ID NO: 1291 - protein, 11 aa, Artificial Sequence
  Synthetic Construct
WGQGILVTVSS

SEQ ID NO: 1292 - protein, 26 aa, Artificial Sequence
  Synthetic Construct
  misc_feature (3)..(3): Xaa can be any naturally occurring amino acid
DVXETQSPLSLPVTPGEPASISCRSS

SEQ ID NO: 1293 - protein, 17 aa, Artificial Sequence
  Synthetic Construct
LDWYLQRPGQSPQLLIY

SEQ ID NO: 1294 - protein, 36 aa, Artificial Sequence
  Synthetic Construct
KRASGVPDRFSGSFSGTDFTLKISRVEAEDVGVYYC

SEQ ID NO: 1295 - protein, 10 aa, Artificial Sequence
  Synthetic Construct
FGLGTKVEIK

SEQ ID NO: 1296 - protein, 255 aa, Artificial Sequence
  Synthetic Construct
  misc_feature (137)..(137): Xaa can be any naturally occurring amino acid
  misc_feature (207)..(207): Xaa can be any naturally occurring amino acid
ESGGEVVQPGGSLRLSCVASGFIFDDYSMHWVRQVPGKGLEWVSLISWDGGRTSYGDSVKGRFTISRDNNKKTLFLQMNSLRPEDTALYYCVKDTGLRSFDSWGQGILVTVSSKGPSVFPLAPSSKSTSGGTAALGXLVKDYFPEPVTVSWNSGALTSGVHTFPAVLQSSGLYSLSSVVTVPSSSLGTQTYICNVNHKPSNTKVDKXVEPKSCDKTHTCPPCPAPELLGGPSVFLFPPKPKDTLMISRTPEVTCV

SEQ ID NO: 1297 - protein, 215 aa, Artificial Sequence
  Synthetic Construct
  misc_feature (3)..(3): Xaa can be any naturally occurring amino acid
DVXETQSPLSLPVTPGEPASISCRSSQSLVHSNGYTYLDWYLQRPGQSPQLLIYMGSKRASGVPDRFSGSFSGTDFTLKISRVEAEDVGVYYCMQALQSWTFGLGTKVEIKAPSVFIFPPSDEQLKSGTASVVCLLNNFYPREAKVQWKVDNALQSGNSQESVTEQDSKDSTYSLSSTLTLSKADYEKHKVYACEVTHQGLSSPVTKSFNRGECK

SEQ ID NO: 1298 - DNA, 255 bp, Artificial Sequence
  Synthetic Construct
ggagtctggcggagaggtcgtacagcctggggggtccctgagactctcttgtgtagcctctggattcatctttgatgattattccatgcactgggtccgtcaagtcccggggaagggtcttgagtgggtctctctaattagttgggatggtggtcgcacatcctatggagactctgtgaagggtcgattcaccatctccagagacaacaacaagaagaccctgtttctgcaaatgaacagtctgagacctgagga

SEQ ID NO: 1299 - DNA, 255 bp, Artificial Sequence
  Synthetic Construct
  misc_feature (8)..(9): n is a, c, g, t or u
gatgttgnngagactcagtctccactctccctgcccgtcacccctggagagccggcctccatctcctgcaggtctagtcagagcctcgttcatagtaatggatacacctatttggattggtacctgcagaggccagggcagtctccgcaactcctgatctatatgggttctaagcgggcctccggggtccctgacaggttcagtggcagtttctcaggcacagattttacactgaaaatcagcagagtggaggct

SEQ ID NO: 1300 - protein, 8 aa, Artificial Sequence
  Synthetic Construct
GFTFDDYS

SEQ ID NO: 1301 - protein, 8 aa, Artificial Sequence
  Synthetic Construct
ISWDGGRT

SEQ ID NO: 1302 - protein, 11 aa, Artificial Sequence
  Synthetic Construct
VKDTGLRSFDS

SEQ ID NO: 1303 - protein, 12 aa, Artificial Sequence
  Synthetic Construct
QSVFDDSSNKNY

SEQ ID NO: 1304 - protein, 3 aa, Artificial Sequence
  Synthetic Construct
WAS

SEQ ID NO: 1305 - protein, 9 aa, Artificial Sequence
  Synthetic Construct
HQYYSTPHS

SEQ ID NO: 1306 - protein, 113 aa, Artificial Sequence
  Synthetic Construct
ESGGVVVQPGGSLRLSCAASGFTFDDYSMHWVRQVPGKGLEWVSLISWDGGRTSYGDSVKGRFTISRDNSKRSLFLQMTNLRPEDTAFYYCVKDTGLRSFDSWGQGTLVTVSS

SEQ ID NO: 1307 - protein, 113 aa, Artificial Sequence
  Synthetic Construct
  misc_feature (2)..(4): Xaa can be any naturally occurring amino acid
DXXXTQSPDSVAVSLGQRATINCESSQSVFDDSSNKNYLAWYQHKPGQPPKLLIYWASSRESGVPDRFIGSGSGTDFTLTISSLQAADVAVYYCHQYYSTPHSFGQGTKVAIK

SEQ ID NO: 1308 - protein, 20 aa, Artificial Sequence
  Synthetic Construct
ESGGVVVQPGGSLRLSCAAS

SEQ ID NO: 1309 - protein, 17 aa, Artificial Sequence
  Synthetic Construct
MHWVRQVPGKGLEWVSL

SEQ ID NO: 1310 - protein, 38 aa, Artificial Sequence
  Synthetic Construct
SYGDSVKGRFTISRDNSKRSLFLQMTNLRPEDTAFYYC

SEQ ID NO: 1311 - protein, 11 aa, Artificial Sequence
  Synthetic Construct
WGQGTLVTVSS

SEQ ID NO: 1312 - protein, 26 aa, Artificial Sequence
  Synthetic Construct
  misc_feature (2)..(4): Xaa can be any naturally occurring amino acid
DXXXTQSPDSVAVSLGQRATINCESS

SEQ ID NO: 1313 - protein, 17 aa, Artificial Sequence
  Synthetic Construct
LAWYQHKPGQPPKLLIY

SEQ ID NO: 1314 - protein, 36 aa, Artificial Sequence; identical to SEQ ID NO: 435
  Synthetic Construct

SEQ ID NO: 1315 - protein, 10 aa, Artificial Sequence
  Synthetic Construct
FGQGTKVAIK

SEQ ID NO: 1316 - protein, 255 aa, Artificial Sequence
  Synthetic Construct
  misc_feature (137)..(137): Xaa can be any naturally occurring amino acid
  misc_feature (207)..(207): Xaa can be any naturally occurring amino acid
ESGGVVVQPGGSLRLSCAASGFTFDDYSMHWVRQVPGKGLEWVSLISWDGGRTSYGDSVKGRFTISRDNSKRSLFLQMTNLRPEDTAFYYCVKDTGLRSFDSWGQGTLVTVSSKGPSVFPLAPSSKSTSGGTAALGXLVKDYFPEPVTVSWNSGALTSGVHTFPAVLQSSGLYSLSSVVTVPSSSLGTQTYICNVNHKPSNTKVDKXVEPKSCDKTHTCPPCPAPELLGGPSVFLFPPKPKDTLMISRTPEVTCV

SEQ ID NO: 1317 - protein, 217 aa, Artificial Sequence
  Synthetic Construct
  misc_feature (2)..(4): Xaa can be any naturally occurring amino acid
DXXXTQSPDSVAVSLGQRATINCESSQSVFDDSSNKNYLAWYQHKPGQPPKLLIYWASSRESGVPDRFIGSGSGTDFTLTISSLQAADVAVYYCHQYYSTPHSFGQGTKVAIKAPSVFIFPPSDEQLKSGTASVVCLLNNFYPREAKVQWKVDNALQSGNSQESVTEQDSKDSTYSLSSTLTLSKADYEKHKVYACEVTHQGLSSPVTKSFNRGECK

SEQ ID NO: 1318 - DNA, 255 bp, Artificial Sequence
  Synthetic Construct
tggagtctggcggagtcgtggtacagcctggggggtccctgagactctcctgtgcagcctctggattcacctttgatgattattccatgcactgggtccgtcaagttccggggaagggtcttgagtgggtctctcttattagttgggatggtggccggacatcctatggagactcagtgaagggtcgattcaccatctccagagacaacagcaagaggtccctgtttctgcaaatgaccaatctgagacctgaag

SEQ ID NO: 1319 - DNA, 255 bp, Artificial Sequence
  Synthetic Construct
  misc_feature (6)..(7): n is a, c, g, t or u
  misc_feature (9)..(10): n is a, c, g, t or u
gacatnngnntgacccagtctccagactccgtggctgtgtctctgggccagagggccaccatcaactgcgagtccagccagagtgttttcgatgactccagcaataagaactacttagcttggtatcaacacaaaccaggacagcctcctaaactactcatttactgggcatctagccgggaatccggggtccctgaccgattcattggcagcgggtctgggacagacttcactctcaccatcagcagcctgcag

SEQ ID NO: 1320 - protein, 8 aa, Artificial Sequence
  Synthetic Construct
GFTFDDYS

SEQ ID NO: 1321 - protein, 8 aa, Artificial Sequence
  Synthetic Construct
ISWDGGRT

SEQ ID NO: 1322 - protein, 11 aa, Artificial Sequence
  Synthetic Construct
VKDTGLRSFDY

SEQ ID NO: 1323 - protein, 11 aa, Artificial Sequence
  Synthetic Construct
QGLQHSNGYNY

SEQ ID NO: 1324 - protein, 3 aa, Artificial Sequence
  Synthetic Construct
MGS

SEQ ID NO: 1325 - protein, 8 aa, Artificial Sequence
  Synthetic Construct
MQALQSWT

SEQ ID NO: 1326 - protein, 113 aa, Artificial Sequence
  Synthetic Construct
ESGGVVVQPGGSLRLSCAASGFTFDDYSMHWVRQLPGKGLEWVSLISWDGGRTDYADSVKGRFTISRDNSKSSLLLQMNSLRLEDTALYYCVKDTGLRSFDYWGQGTLVTVSS

SEQ ID NO: 1327 - protein, 111 aa, Artificial Sequence
  Synthetic Construct
DVGETQSPLSLPVTPGEPASMSCRSSQGLQHSNGYNYVDWYLQKPGQSPQLLIYMGSKRASGVPDRFSGSGSGTDFTLKISRVEAEDVGVYYCMQALQSWTFGQGTKVEIK

SEQ ID NO: 1328 - protein, 20 aa, Artificial Sequence
  Synthetic Construct
ESGGVVVQPGGSLRLSCAAS

SEQ ID NO: 1329 - protein, 17 aa, Artificial Sequence
  Synthetic Construct
MHWVRQLPGKGLEWVSL

SEQ ID NO: 1330 - protein, 38 aa, Artificial Sequence
  Synthetic Construct
DYADSVKGRFTISRDNSKSSLLLQMNSLRLEDTALYYC

SEQ ID NO: 1331 - protein, 11 aa, Artificial Sequence
  Synthetic Construct
WGQGTLVTVSS

SEQ ID NO: 1332 - protein, 26 aa, Artificial Sequence
  Synthetic Construct
DVGETQSPLSLPVTPGEPASMSCRSS

SEQ ID NO: 1333 - protein, 17 aa, Artificial Sequence
  Synthetic Construct
VDWYLQKPGQSPQLLIY

SEQ ID NO: 1334 - protein, 36 aa, Artificial Sequence; identical to SEQ ID NO: 195
  Synthetic Construct

SEQ ID NO: 1335 - protein, 10 aa, Artificial Sequence
  Synthetic Construct
FGQGTKVEIK

SEQ ID NO: 1336 - protein, 255 aa, Artificial Sequence
  Synthetic Construct
  misc_feature (137)..(137): Xaa can be any naturally occurring amino acid
  misc_feature (207)..(207): Xaa can be any naturally occurring amino acid
ESGGVVVQPGGSLRLSCAASGFTFDDYSMHWVRQLPGKGLEWVSLISWDGGRTDYADSVKGRFTISRDNSKSSLLLQMNSLRLEDTALYYCVKDTGLRSFDYWGQGTLVTVSSKGPSVFPLAPSSKSTSGGTAALGXLVKDYFPEPVTVSWNSGALTSGVHTFPAVLQSSGLYSLSSVVTVPSSSLGTQTYICNVNHKPSNTKVDKXVEPKSCDKTHTCPPCPAPELLGGPSVFLFPPKPKDTLMISRTPEVTCV

SEQ ID NO: 1337 - protein, 215 aa, Artificial Sequence
  Synthetic Construct
DVGETQSPLSLPVTPGEPASMSCRSSQGLQHSNGYNYVDWYLQKPGQSPQLLIYMGSKRASGVPDRFSGSGSGTDFTLKISRVEAEDVGVYYCMQALQSWTFGQGTKVEIKAPSVFIFPPSDEQLKSGTASVVCLLNNFYPREAKVQWKVDNALQSGNSQESVTEQDSKDSTYSLSSTLTLSKADYEKHKVYACEVTHQGLSSPVTKSFNRGECK

SEQ ID NO: 1338 - DNA, 255 bp, Artificial Sequence
  Synthetic Construct
ggagtctggcggagtcgtggtacagcctgggggatccctgagactctcctgtgcagcctctggattcacttttgatgattactccatgcactgggtccgtcaacttccggggaaaggtctggagtgggtctctcttattagttgggatggaggtcgcacagactatgcagactctgtgaagggtcgattcaccatctccagagacaatagcaagagctccctgcttctgcaaatgaacagtctgagacttgaaga

SEQ ID NO: 1339 - DNA, 255 bp, Artificial Sequence
  Synthetic Construct
  misc_feature (9)..(9): n is a, c, g, t or u
gatgttggngagactcagtctccactctccctgcccgtcacccctggagagccggcctccatgtcctgcaggtctagtcagggcctccagcatagtaatggatacaactatgtggattggtacctgcagaagccagggcagtctccacagctcctgatctatatgggctctaagcgggcctccggggtccctgacaggttcagtggcagtggatcaggcacagattttacactgaaaatcagcagagtggaggct

SEQ ID NO: 1340 - protein, 8 aa, Artificial Sequence
  Synthetic Construct
GFTFNYAV

SEQ ID NO: 1341 - protein, 10 aa, Artificial Sequence
  Synthetic Construct
IDSESDGGTT

SEQ ID NO: 1342 - protein, 15 aa, Artificial Sequence
  Synthetic Construct
NTHFYCTTTSCYGDH

SEQ ID NO: 1343 - protein, 12 aa, Artificial Sequence
  Synthetic Construct
QSVLYSPKNKHY

SEQ ID NO: 1344 - protein, 3 aa, Artificial Sequence
  Synthetic Construct
WAS

SEQ ID NO: 1345 - protein, 8 aa, Artificial Sequence
  Synthetic Construct
QQYYSGRT

SEQ ID NO: 1346 - protein, 119 aa, Artificial Sequence
  Synthetic Construct
ESGGGLVKPGESLRLSCEGSGFTFNYAVMSWVRQAPGKGLEWVGRIDSESDGGTTDYAAPVKGRFTISRDDSRNTLHLQMNSLEIGDTAVYYCNTHFYCTTTSCYGDHWGQGTLVTVSS

SEQ ID NO: 1347 - protein, 112 aa, Artificial Sequence
  Synthetic Construct
  misc_feature (2)..(3): Xaa can be any naturally occurring amino acid
TXXVTQSPEFLSLSLGERASINCKASQSVLYSPKNKHYLAWYQQKPGQPPKLLMYWASTRESGVPDRFSGSGSGTDFTLTINTFQAEDVAVYYCQQYYSGRTFGPGTKVDIK

SEQ ID NO: 1348 - protein, 20 aa, Artificial Sequence
  Synthetic Construct
ESGGGLVKPGESLRLSCEGS

SEQ ID NO: 1349 - protein, 17 aa, Artificial Sequence
  Synthetic Construct
MSWVRQAPGKGLEWVGR

SEQ ID NO: 1350 - protein, 38 aa, Artificial Sequence
  Synthetic Construct
DYAAPVKGRFTISRDDSRNTLHLQMNSLEIGDTAVYYC

SEQ ID NO: 1351 - protein, 11 aa, Artificial Sequence
  Synthetic Construct
WGQGTLVTVSS

SEQ ID NO: 1352 - protein, 26 aa, Artificial Sequence
  Synthetic Construct
  misc_feature (2)..(3): Xaa can be any naturally occurring amino acid
TXXVTQSPEFLSLSLGERASINCKAS

SEQ ID NO: 1353 - protein, 17 aa, Artificial Sequence
  Synthetic Construct
LAWYQQKPGQPPKLLMY

SEQ ID NO: 1354 - protein, 36 aa, Artificial Sequence
  Synthetic Construct
TRESGVPDRFSGSGSGTDFTLTINTFQAEDVAVYYC

SEQ ID NO: 1355 - protein, 10 aa, Artificial Sequence
  Synthetic Construct
FGPGTKVDIK

SEQ ID NO: 1356 - protein, 255 aa, Artificial Sequence
  Synthetic Construct
  misc_feature (143)..(143): Xaa can be any naturally occurring amino acid
  misc_feature (213)..(213): Xaa can be any naturally occurring amino acid
ESGGGLVKPGESLRLSCEGSGFTFNYAVMSWVRQAPGKGLEWVGRIDSESDGGTTDYAAPVKGRFTISRDDSRNTLHLQMNSLEIGDTAVYYCNTHFYCTTTSCYGDHWGQGTLVTVSSKGPSVFPLAPSSKSTSGGTAALGXLVKDYFPEPVTVSWNSGALTSGVHTFPAVLQSSGLYSLSSVVTVPSSSLGTQTYICNVNHKPSNTKVDKXVEPKSCDKTHTCPPCPAPELLGGPSVFLFPPKPKDTLMISRT

SEQ ID NO: 1357 - protein, 216 aa, Artificial Sequence
  Synthetic Construct
  misc_feature (2)..(3): Xaa can be any naturally occurring amino acid
TXXVTQSPEFLSLSLGERASINCKASQSVLYSPKNKHYLAWYQQKPGQPPKLLMYWASTRESGVPDRFSGSGSGTDFTLTINTFQAEDVAVYYCQQYYSGRTFGPGTKVDIKAPSVFIFPPSDEQLKSGTASVVCLLNNFYPREAKVQWKVDNALQSGNSQESVTEQDSKDSTYSLSSTLTLSKADYEKHKVYACEVTHQGLSSPVTKSFNRGECK

SEQ ID NO: 1358 - DNA, 255 bp, Artificial Sequence
  Synthetic Construct
gagtctgggggaggcttggtaaagcctggggagtcccttcgactctcctgtgaaggctctggattcactttcaattacgccgtgatgagctgggtccgccaggctccagggaaggggctggagtgggttggccgtattgatagcgaaagtgacggtgggacaacagactacgctgcacccgtgaaaggcagattcaccatctcaagagacgattcaagaaacacgctgcatctgcagatgaacagcctggaaatc

SEQ ID NO: 1359 - DNA, 255 bp, Artificial Sequence
  Synthetic Construct
  misc_feature (5)..(5): n is a, c, g, t or u
  misc_feature (8)..(9): n is a, c, g, t or u
acatnggnngtgacccagtctccagagttcctgagtctgtctctgggcgagagggcctccatcaactgcaaggccagccagagtgttttatacagccccaaaaataagcactacttggcttggtatcagcagaaacctggacagcctcctaagctgctcatgtattgggcttctacccgggaatccggggtccctgaccgattcagtggcagcgggtctggtacagatttcactctcaccatcaacaccttccag

SEQ ID NO: 1360 - protein, 8 aa, Artificial Sequence
  Synthetic Construct
GYSFTRFD

SEQ ID NO: 1361 - protein, 8 aa, Artificial Sequence
  Synthetic Construct
MNPKSGHS

SEQ ID NO: 1362 - protein, 8 aa, Artificial Sequence
  Synthetic Construct
  misc_feature (8)..(8): Xaa can be any naturally occurring amino acid
ARGVDNRX

SEQ ID NO: 1363 - protein, 12 aa, Artificial Sequence
  Synthetic Construct
QSVFDDSSNKNY

SEQ ID NO: 1364 - protein, 3 aa, Artificial Sequence
  Synthetic Construct
WAS

SEQ ID NO: 1365 - protein, 9 aa, Artificial Sequence
  Synthetic Construct
LQYYSTPHS

SEQ ID NO: 1366 - protein, 109 aa, Artificial Sequence; identical to SEQ ID NO: 427
  Synthetic Construct
  misc_feature (98)..(98): Xaa can be any naturally occurring amino acid

SEQ ID NO: 1367 - protein, 113 aa, Artificial Sequence; identical to SEQ ID NO: 428
  Synthetic Construct
  misc_feature (3)..(4): Xaa can be any naturally occurring amino acid

SEQ ID NO: 1368 - protein, 19 aa, Artificial Sequence
  Synthetic Construct
SGAEVKKPGASVKVSCKTS

SEQ ID NO: 1369 - protein, 17 aa, Artificial Sequence
  Synthetic Construct
INWVRQATGQGLEWMGW

SEQ ID NO: 1370 - protein, 38 aa, Artificial Sequence; identical to SEQ ID NO: 431
  Synthetic Construct

SEQ ID NO: 1371 - protein, 11 aa, Artificial Sequence
  Synthetic Construct
WGQGTLITVSS

SEQ ID NO: 1372 - protein, 26 aa, Artificial Sequence
  Synthetic Construct
  misc_feature (3)..(4): Xaa can be any naturally occurring amino acid
DIXXTQSPDSVAVSLGQRATINCESS

SEQ ID NO: 1373 - protein, 17 aa, Artificial Sequence
  Synthetic Construct
LAWYQHKPGQPPKLLIY

SEQ ID NO: 1374 - protein, 36 aa, Artificial Sequence; identical to SEQ ID NO: 435
  Synthetic Construct

SEQ ID NO: 1375 - protein, 10 aa, Artificial Sequence
  Synthetic Construct
FGQGTKVAIN

SEQ ID NO: 1376 - protein, 255 aa, Artificial Sequence
  Synthetic Construct
  misc_feature (98)..(98): Xaa can be any naturally occurring amino acid
  misc_feature (133)..(133): Xaa can be any naturally occurring amino acid
  misc_feature (203)..(203): Xaa can be any naturally occurring amino acid
SGAEVKKPGASVKVSCKTSGYSFTRFDINWVRQATGQGLEWMGWMNPKSGHSGPAQKFQGRITMTVNTSISTAYMELSSLRFEDTAVYYCARGVDNRXWGQGTLITVSSKGPSVFPLAPSSKSTSGGTAALGXLVKDYFPEPVTVSWNSGALTSGVHTFPAVLQSSGLYSLSSVVTVPSSSLGTQTYICNVNHKPSNTKVDKXVEPKSCDKTHTCPPCPAPELLGGPSVFLFPPKPKDTLMISRTPEVTCVVVDV

SEQ ID NO: 1377 - protein, 217 aa, Artificial Sequence; identical to SEQ ID NO: 418
  Synthetic Construct
  misc_feature (3)..(4): Xaa can be any naturally occurring amino acid

SEQ ID NO: 1378 - DNA, 255 bp, Artificial Sequence
  Synthetic Construct
agtctggggctgaggtgaagaagcctggggcctcagtgaaggtctcctgcaagacttctggatacagcttcacccgttttgatatcaactgggtgcgacaggccactggacaagggcttgagtggatgggatggatgaaccctaagagtggtcactcaggccctgcacagaagttccagggcagaatcaccatgaccgttaacacctccataagtacagcctacatggagctgagcagcctgagatttgaggaca

SEQ ID NO: 1379 - DNA, 255 bp, Artificial Sequence
  Synthetic Construct
  misc_feature (8)..(12): n is a, c, g, t or u
gacatcgnnnnnacccagtctccagactccgtggctgtgtctctgggccagagggccaccatcaactgcgagtccagccagagtgttttcgatgactccagcaataagaactacttagcttggtatcaacacaaaccaggacagcctcctaaactactcatttactgggcatctagccgggaatccggggtccctgaccgattcattggcagcgggtctgggacagacttcactctcaccatcagcagcctgcag

SEQ ID NO: 1380 - protein, 8 aa, Artificial Sequence
  Synthetic Construct
GFTFDDYS

SEQ ID NO: 1381 - protein, 8 aa, Artificial Sequence
  Synthetic Construct
ISWDGART

SEQ ID NO: 1382 - protein, 11 aa, Artificial Sequence
  Synthetic Construct
VKDTGLRSFDS

SEQ ID NO: 1383 - protein, 11 aa, Artificial Sequence
  Synthetic Construct
QSLLHSNGYNY

SEQ ID NO: 1384 - protein, 3 aa, Artificial Sequence
  Synthetic Construct
MGS

SEQ ID NO: 1385 - protein, 8 aa, Artificial Sequence
  Synthetic Construct
MQALQTWT

SEQ ID NO: 1386 - protein, 114 aa, Artificial Sequence
  Synthetic Construct
VESGGVVVQPGGSLRLSCAASGFTFDDYSMHWVRQVPGKGLEWVSLISWDGARTSYGDSVKGRFTISRDNSKRSLFLQMTNLRPEDTAFYYCVKDTGLRSFDSWGQGTLVTVSS

SEQ ID NO: 1387 - protein, 111 aa, Artificial Sequence
  Synthetic Construct
  misc_feature (3)..(3): Xaa can be any naturally occurring amino acid
DVXETQSPLSLPVTPGEPASISCRSSQSLLHSNGYNYLDWYLQKPGQSPQLLIYMGSKRASGVPDRFSGSVSGTDFTLKISRVEAEDVGVYYCMQALQTWTFGQGTKVEIK

SEQ ID NO: 1388 - protein, 21 aa, Artificial Sequence
  Synthetic Construct
VESGGVVVQPGGSLRLSCAAS

SEQ ID NO: 1389 - protein, 17 aa, Artificial Sequence
  Synthetic Construct
MHWVRQVPGKGLEWVSL

SEQ ID NO: 1390 - protein, 38 aa, Artificial Sequence; identical to SEQ ID NO: 1310
  Synthetic Construct

SEQ ID NO: 1391 - protein, 11 aa, Artificial Sequence
  Synthetic Construct
WGQGTLVTVSS

SEQ ID NO: 1392 - protein, 26 aa, Artificial Sequence
  Synthetic Construct
  misc_feature (3)..(3): Xaa can be any naturally occurring amino acid
DVXETQSPLSLPVTPGEPASISCRSS

SEQ ID NO: 1393 - protein, 17 aa, Artificial Sequence
  Synthetic Construct
LDWYLQKPGQSPQLLIY

SEQ ID NO: 1394 - protein, 36 aa, Artificial Sequence
  Synthetic Construct
KRASGVPDRFSGSVSGTDFTLKISRVEAEDVGVYYC

SEQ ID NO: 1395 - protein, 10 aa, Artificial Sequence
  Synthetic Construct
FGQGTKVEIK

SEQ ID NO: 1396 - protein, 255 aa, Artificial Sequence
  Synthetic Construct
  misc_feature (138)..(138): Xaa can be any naturally occurring amino acid
  misc_feature (208)..(208): Xaa can be any naturally occurring amino acid
VESGGVVVQPGGSLRLSCAASGFTFDDYSMHWVRQVPGKGLEWVSLISWDGARTSYGDSVKGRFTISRDNSKRSLFLQMTNLRPEDTAFYYCVKDTGLRSFDSWGQGTLVTVSSKGPSVFPLAPSSKSTSGGTAALGXLVKDYFPEPVTVSWNSGALTSGVHTFPAVLQSSGLYSLSSVVTVPSSSLGTQTYICNVNHKPSNTKVDKXVEPKSCDKTHTCPPCPAPELLGGPSVFLFPPKPKDTLMISRTPEVTC

SEQ ID NO: 1397 - protein, 215 aa, Artificial Sequence
  Synthetic Construct
  misc_feature (3)..(3): Xaa can be any naturally occurring amino acid
DVXETQSPLSLPVTPGEPASISCRSSQSLLHSNGYNYLDWYLQKPGQSPQLLIYMGSKRASGVPDRFSGSVSGTDFTLKISRVEAEDVGVYYCMQALQTWTFGQGTKVEIKAPSVFIFPPSDEQLKSGTASVVCLLNNFYPREAKVQWKVDNALQSGNSQESVTEQDSKDSTYSLSSTLTLSKADYEKHKVYACEVTHQGLSSPVTKSFNRGECK

SEQ ID NO: 1398 - DNA, 255 bp, Artificial Sequence
  Synthetic Construct
gtggagtctggcggagtcgtggtacagcctggggggtccctgagactctcctgtgcagcctctggattcacctttgatgattattccatgcactgggtccgtcaagttccggggaagggtcttgagtgggtctctcttattagttgggatggtgcccggacatcctatggagactctgtgaagggtcgattcaccatctccagagacaacagcaagaggtccctgtttctgcaaatgaccaatctgagacctgaa

SEQ ID NO: 1399 - DNA, 255 bp, Artificial Sequence
  Synthetic Construct
  misc_feature (7)..(9): n is a, c, g, t or u
gatgttnnngagactcagtctccactctccctgcccgtcacccctggagagccggcctccatctcctgcaggtctagtcagagcctcctgcatagtaatggatacaactatttggattggtacctccagaagccagggcagtctccacagctcctgatctatatgggttctaagcgggcctccggggtccctgacaggttcagtggcagtgtctcaggcacagattttacactgaaaatcagcagagtggaggct

SEQ ID NO: 1400 - protein, 8 aa, Artificial Sequence
  Synthetic Construct
GFTFGDYT

SEQ ID NO: 1401 - protein, 8 aa, Artificial Sequence
  Synthetic Construct
IKWNGGGI

SEQ ID NO: 1402 - protein, 11 aa, Artificial Sequence
  Synthetic Construct
AKDIGLRSLDS

SEQ ID NO: 1403 - protein, 11 aa, Artificial Sequence
  Synthetic Construct
QSLLHSNGYTY

SEQ ID NO: 1404 - protein, 3 aa, Artificial Sequence
  Synthetic Construct
MGS

SEQ ID NO: 1405 - protein, 8 aa, Artificial Sequence
  Synthetic Construct
MQALQGWT

SEQ ID NO: 1406 - protein, 117 aa, Artificial Sequence
  Synthetic Construct
  misc_feature (2)..(3): Xaa can be any naturally occurring amino acid
  misc_feature (63)..(63): Xaa can be any naturally occurring amino acid
CXXVESGGGLVQPGRSLRLSCTASGFTFGDYTMHWVRQAPGKGLEWVSNIKWNGGGIGYADSXKGRFTISRDNAGNSLYLQMNSLRPEDTAFYYCAKDIGLRSLDSWGQGTLVIVSS

SEQ ID NO: 1407 - protein, 111 aa, Artificial Sequence
  Synthetic Construct
DVVMTQSPLSLPVTPGEPASISCRSSQSLLHSNGYTYLDWYLQKPGQSPQLLIYMGSKRASGVPDRFSGSFSDTDFTLTISRVEAEDVGVYYCMQALQGWTFGQGTKVEIK

SEQ ID NO: 1408 - protein, 24 aa, Artificial Sequence
  Synthetic Construct
  misc_feature (2)..(3): Xaa can be any naturally occurring amino acid
CXXVESGGGLVQPGRSLRLSCTAS

SEQ ID NO: 1409 - protein, 17 aa, Artificial Sequence
  Synthetic Construct
MHWVRQAPGKGLEWVSN

SEQ ID NO: 1410 - protein, 38 aa, Artificial Sequence
  Synthetic Construct
  misc_feature (6)..(6): Xaa can be any naturally occurring amino acid
GYADSXKGRFTISRDNAGNSLYLQMNSLRPEDTAFYYC

SEQ ID NO: 1411 - protein, 11 aa, Artificial Sequence
  Synthetic Construct
WGQGTLVIVSS

SEQ ID NO: 1412 - protein, 26 aa, Artificial Sequence
  Synthetic Construct
DVVMTQSPLSLPVTPGEPASISCRSS

SEQ ID NO: 1413 - protein, 17 aa, Artificial Sequence
  Synthetic Construct
LDWYLQKPGQSPQLLIY

SEQ ID NO: 1414 - protein, 36 aa, Artificial Sequence
  Synthetic Construct
KRASGVPDRFSGSFSDTDFTLTISRVEAEDVGVYYC

SEQ ID NO: 1415 - protein, 10 aa, Artificial Sequence
  Synthetic Construct
FGQGTKVEIK

SEQ ID NO: 1416 - protein, 255 aa, Artificial Sequence
  Synthetic Construct
  misc_feature (2)..(3): Xaa can be any naturally occurring amino acid
  misc_feature (63)..(63): Xaa can be any naturally occurring amino acid
  misc_feature (141)..(141): Xaa can be any naturally occurring amino acid
  misc_feature (211)..(211): Xaa can be any naturally occurring amino acid
CXXVESGGGLVQPGRSLRLSCTASGFTFGDYTMHWVRQAPGKGLEWVSNIKWNGGGIGYADSXKGRFTISRDNAGNSLYLQMNSLRPEDTAFYYCAKDIGLRSLDSWGQGTLVIVSSKGPSVFPLAPSSKSTSGGTAALGXLVKDYFPEPVTVSWNSGALTSGVHTFPAVLQSSGLYSLSSVVTVPSSSLGTQTYICNVNHKPSNTKVDKXVEPKSCDKTHTCPPCPAPELLGGPSVFLFPPKPKDTLMISRTPE

SEQ ID NO: 1417 - protein, 215 aa, Artificial Sequence
  Synthetic Construct
DVVMTQSPLSLPVTPGEPASISCRSSQSLLHSNGYTYLDWYLQKPGQSPQLLIYMGSKRASGVPDRFSGSFSDTDFTLTISRVEAEDVGVYYCMQALQGWTFGQGTKVEIKAPSVFIFPPSDEQLKSGTASVVCLLNNFYPREAKVQWKVDNALQSGNSQESVTEQDSKDSTYSLSSTLTLSKADYEKHKVYACEVTHQGLSSPVTKSFNRGECK

SEQ ID NO: 1418 - DNA, 255 bp, Artificial Sequence
  Synthetic Construct
  misc_feature (5)..(5): n is a, c, g, t or u
  misc_feature (7)..(10): n is a, c, g, t or u
  misc_feature (189)..(189): n is a, c, g, t or u
gtgcnannnngtggaatctgggggaggcttggtacagcctggcaggtccctgagactctcctgtacagcctctggtttcacctttggtgattataccatgcattgggtccggcaagctccagggaagggcctggagtgggtctcaaatattaagtggaatggtggtggcataggctatgcggactctgntaagggccgattcaccatctccagagacaacgccgggaactccctctatctacaaatgaacagtct

SEQ ID NO: 1419 - DNA, 255 bp, Artificial Sequence
  Synthetic Construct
gatgttgtgatgactcagtctccactctccctgcccgtcacccctggagagccggcctccatctcctgcaggtctagtcagagcctcctgcatagtaatggatacacctatttggattggtacctgcagaagccagggcagtctccacagctcctgatctatatgggttctaagcgggcctccggggtccctgacaggttcagtggcagtttctcagacacagatttcacactgacaatcagcagagtggaggct

SEQ ID NO: 1420 - protein, 8 aa, Artificial Sequence
  Synthetic Construct
GFTFNNYA

SEQ ID NO: 1421 - protein, 8 aa, Artificial Sequence
  Synthetic Construct
ISASGGSR

SEQ ID NO: 1422 - protein, 18 aa, Artificial Sequence
  Synthetic Construct
AKDRVEDGNYEKDWHFDL

SEQ ID NO: 1423 - protein, 7 aa, Artificial Sequence
  Synthetic Construct
PIVSGNY

SEQ ID NO: 1424 - protein, 3 aa, Artificial Sequence
  Synthetic Construct
DAS

SEQ ID NO: 1425 - protein, 9 aa, Artificial Sequence
  Synthetic Construct
QQYAKSPVT

SEQ ID NO: 1426 - protein, 124 aa, Artificial Sequence
  Synthetic Construct
  misc_feature (2)..(3): Xaa can be any naturally occurring amino acid
AXXVESGGGLGQPGGSLRLSCPASGFTFNNYAMSWIRQAPGKGLEWVSAISASGGSRFYADSVRGRFTISRDNAKNTLYLQLNSLRAEDTAVYFCAKDRVEDGNYEKDWHFDLWGRGTLVTVSS

SEQ ID NO: 1427 - protein, 108 aa, Artificial Sequence
  Synthetic Construct
  misc_feature (4)..(4): Xaa can be any naturally occurring amino acid
EIVXTQSPGTLSLSPGERATLSCRASPIVSGNYLAWYQQRPGQSPRLLIYDASSRASGVPDRFSGGGSATDFTLTISRLEPEDFAVYYCQQYAKSPVTFGGGTKVEIK

SEQ ID NO: 1428 - protein, 24 aa, Artificial Sequence
  Synthetic Construct
  misc_feature (2)..(3): Xaa can be any naturally occurring amino acid
AXXVESGGGLGQPGGSLRLSCPAS

SEQ ID NO: 1429 - protein, 17 aa, Artificial Sequence
  Synthetic Construct
MSWIRQAPGKGLEWVSA

SEQ ID NO: 1430 - protein, 38 aa, Artificial Sequence
  Synthetic Construct
FYADSVRGRFTISRDNAKNTLYLQLNSLRAEDTAVYFC

SEQ ID NO: 1431 - protein, 11 aa, Artificial Sequence
  Synthetic Construct
WGRGTLVTVSS

SEQ ID NO: 1432 - protein, 26 aa, Artificial Sequence
  Synthetic Construct
  misc_feature (4)..(4): Xaa can be any naturally occurring amino acid
EIVXTQSPGTLSLSPGERATLSCRAS

SEQ ID NO: 1433 - protein, 17 aa, Artificial Sequence
  Synthetic Construct
LAWYQQRPGQSPRLLIY

SEQ ID NO: 1434 - protein, 36 aa, Artificial Sequence
  Synthetic Construct
SRASGVPDRFSGGGSATDFTLTISRLEPEDFAVYYC

SEQ ID NO: 1435 - protein, 10 aa, Artificial Sequence
  Synthetic Construct
FGGGTKVEIK

SEQ ID NO: 1436 - protein, 255 aa, Artificial Sequence
  Synthetic Construct
  misc_feature (2)..(3): Xaa can be any naturally occurring amino acid
  misc_feature (148)..(148): Xaa can be any naturally occurring amino acid
  misc_feature (218)..(218): Xaa can be any naturally occurring amino acid
AXXVESGGGLGQPGGSLRLSCPASGFTFNNYAMSWIRQAPGKGLEWVSAISASGGSRFYADSVRGRFTISRDNAKNTLYLQLNSLRAEDTAVYFCAKDRVEDGNYEKDWHFDLWGRGTLVTVSSKGPSVFPLAPSSKSTSGGTAALGXLVKDYFPEPVTVSWNSGALTSGVHTFPAVLQSSGLYSLSSVVTVPSSSLGTQTYICNVNHKPSNTKVDKXVEPKSCDKTHTCPPCPAPELLGGPSVFLFPPKPKDTL

SEQ ID NO: 1437 - protein, 212 aa, Artificial Sequence
  Synthetic Construct
  misc_feature (4)..(4): Xaa can be any naturally occurring amino acid
EIVXTQSPGTLSLSPGERATLSCRASPIVSGNYLAWYQQRPGQSPRLLIYDASSRASGVPDRFSGGGSATDFTLTISRLEPEDFAVYYCQQYAKSPVTFGGGTKVEIKAPSVFIFPPSDEQLKSGTASVVCLLNNFYPREAKVQWKVDNALQSGNSQESVTEQDSKDSTYSLSSTLTLSKADYEKHKVYACEVTHQGLSSPVTKSFNRGECK

SEQ ID NO: 1438 - DNA, 255 bp, Artificial Sequence
  Synthetic Construct
  misc_feature (8)..(11): n is a, c, g, t or u
gtgccaannnngtggagtcggggggaggcttggggcagccgggggggtccctgagactctcctgtccagcctctggattcacctttaacaactatgccatgagttggatccgccaggctccagggaaggggctggagtgggtctcagctattagcgccagtggcggtagcagattctacgcagactccgtgaggggccgattcaccatctccagagacaatgccaagaacaccctatatctccaactgaacagcc

SEQ ID NO: 1439 - DNA, 255 bp, Artificial Sequence
  Synthetic Construct
  misc_feature (9)..(11): n is a, c, g, t or u
gaaattgtnnngacgcagtctccaggcaccctgtctttgtctccaggggagagagccaccctctcctgcagggccagtccgattgttagcggcaattacttagcctggtatcagcagagacctggccagtctccccggctcctcatctatgatgcatccagcagggccagtggcgtcccagacaggttcagtggcggtgggtctgcgacagacttcactctcaccatcagcagactggagcctgaagactttgca

SEQ ID NO: 1440 - protein, 8 aa, Artificial Sequence
  Synthetic Construct
GYTFSSYD

SEQ ID NO: 1441 - protein, 8 aa, Artificial Sequence
  Synthetic Construct
MNPKNGYS

SEQ ID NO: 1442 - protein, 16 aa, Artificial Sequence
  Synthetic Construct
VRVRTISQGDSWYFDL

SEQ ID NO: 1443 - protein, 6 aa, Artificial Sequence
  Synthetic Construct
QGLTVS

SEQ ID NO: 1444 - protein, 3 aa, Artificial Sequence
  Synthetic Construct
AAS

SEQ ID NO: 1445 - protein, 9 aa, Artificial Sequence
  Synthetic Construct
MHTLQPPYT

SEQ ID NO: 1446 - protein, 119 aa, Artificial Sequence
  Synthetic Construct
VQSGPEVKKPGASVKVSCKASGYTFSSYDFNWVRQAPGQGLEWMGWMNPKNGYSGFAQNFRGRISMTRNSSITTAYMELTSLTSDDTAVYYCVRVRTISQGDSWYFDLWGRGTLVTVSS

SEQ ID NO: 1447 - protein, 107 aa, Artificial Sequence
  Synthetic Construct
  misc_feature (62)..(62): Xaa can be any naturally occurring amino acid
DMATTQSPSSVSASEGDRAVISCRASQGLTVSLARNHPETGEAPNLLISAASSLRGTVAAPXSGSGSGTDFTLKITRVEAEDVGVYYCMHTLQPPYTFGRGTKLEIK

SEQ ID NO: 1448 - protein, 21 aa, Artificial Sequence
  Synthetic Construct
VQSGPEVKKPGASVKVSCKAS

SEQ ID NO: 1449 - protein, 17 aa, Artificial Sequence
  Synthetic Construct
FNWVRQAPGQGLEWMGW

SEQ ID NO: 1450 - protein, 38 aa, Artificial Sequence
  Synthetic Construct
GFAQNFRGRISMTRNSSITTAYMELTSLTSDDTAVYYC

SEQ ID NO: 1451 - protein, 11 aa, Artificial Sequence
  Synthetic Construct
WGRGTLVTVSS

SEQ ID NO: 1452 - protein, 26 aa, Artificial Sequence
  Synthetic Construct
DMATTQSPSSVSASEGDRAVISCRAS

SEQ ID NO: 1453 - protein, 17 aa, Artificial Sequence
  Synthetic Construct
LARNHPETGEAPNLLIS

SEQ ID NO: 1454 - protein, 36 aa, Artificial Sequence
  Synthetic Construct
  misc_feature (10)..(10): Xaa can be any naturally occurring amino acid
SLRGTVAAPXSGSGSGTDFTLKITRVEAEDVGVYYC

SEQ ID NO: 1455 - protein, 10 aa, Artificial Sequence
  Synthetic Construct
FGRGTKLEIK

SEQ ID NO: 1456 - protein, 255 aa, Artificial Sequence
  Synthetic Construct
  misc_feature (143)..(143): Xaa can be any naturally occurring amino acid
  misc_feature (213)..(213): Xaa can be any naturally occurring amino acid
VQSGPEVKKPGASVKVSCKASGYTFSSYDFNWVRQAPGQGLEWMGWMNPKNGYSGFAQNFRGRISMTRNSSITTAYMELTSLTSDDTAVYYCVRVRTISQGDSWYFDLWGRGTLVTVSSKGPSVFPLAPSSKSTSGGTAALGXLVKDYFPEPVTVSWNSGALTSGVHTFPAVLQSSGLYSLSSVVTVPSSSLGTQTYICNVNHKPSNTKVDKXVEPKSCDKTHTCPPCPAPELLGGPSVFLFPPKPKDTLMISRT

SEQ ID NO: 1457 - protein, 211 aa, Artificial Sequence
  Synthetic Construct
  misc_feature (62)..(62): Xaa can be any naturally occurring amino acid
DMATTQSPSSVSASEGDRAVISCRASQGLTVSLARNHPETGEAPNLLISAASSLRGTVAAPXSGSGSGTDFTLKITRVEAEDVGVYYCMHTLQPPYTFGRGTKLEIKAPSVFIFPPSDEQLKSGTASVVCLLNNFYPREAKVQWKVDNALQSGNSQESVTEQDSKDSTYSLSSTLTLSKADYEKHKVYACEVTHQGLSSPVTKSFNRGECK

SEQ ID NO: 1458 - DNA, 255 bp, Artificial Sequence
  Synthetic Construct
ggtgcagtctgggcctgaggtgaagaagcctggggcctcagtgaaggtctcctgcaaggcttctggatataccttcagtagttatgacttcaactgggtgcgacaggcccctggacaagggcttgagtggatgggatggatgaaccctaaaaatggttactcaggcttcgcacagaatttccggggccggatatccatgaccaggaactcctccataaccacagcctacatggagctgaccagcctgacatctga

SEQ ID NO: 1459 - DNA, 255 bp, Artificial Sequence
  Synthetic Construct
  misc_feature (185)..(185): n is a, c, g, t or u
gacatggcgacgacccagtctccatcttccgtgtctgcatctgaaggggacagagccgtcatctcttgtcgggcgagtcagggtcttaccgtgtcgttagccaggaatcacccggagacaggggaagcccctaacctcctaatctctgctgcatcgagtttgcgaggaactgtggctgcaccatncagtggcagtggatcaggcacagattttacactgaaaatcaccagagtggaggctgaggatgttggggtt

SEQ ID NO: 1460 - protein, 8 aa, Artificial Sequence
  Synthetic Construct
GYTFSNYD

SEQ ID NO: 1461 - protein, 8 aa, Artificial Sequence
  Synthetic Construct
MNPKNGYS

SEQ ID NO: 1462 - protein, 16 aa, Artificial Sequence
  Synthetic Construct
VRVRTISKGDSWYFDL

SEQ ID NO: 1463 - protein, 11 aa, Artificial Sequence
  Synthetic Construct
QSLLHNNGYNY

SEQ ID NO: 1464 - protein, 3 aa, Artificial Sequence
  Synthetic Construct
LVS

SEQ ID NO: 1465 - protein, 9 aa, Artificial Sequence
  Synthetic Construct
MHTLQPPYT

SEQ ID NO: 1466 - protein, 118 aa, Artificial Sequence
  Synthetic Construct
QSGPEVKKPGASVKVSCKSSGYTFSNYDFNWVRQAPGQGLEWMGWMNPKNGYSGFAQNFRGRISMTRNSSITTAYMELTSLTSDDTALYYCVRVRTISKGDSWYFDLWGRGTLVTVSS

SEQ ID NO: 1467 - protein, 112 aa, Artificial Sequence
  Synthetic Construct
  misc_feature (3)..(4): Xaa can be any naturally occurring amino acid
  misc_feature (68)..(68): Xaa can be any naturally occurring amino acid
  misc_feature (110)..(110): Xaa can be any naturally occurring amino acid
RCXXTQSQVSLPVTPGEPASISCRSSQSLLHNNGYNYVDWYLQKPGQSPQLLIYLVSNPVSIFRVCIXGSGSGTDFTLKITRVEAEDVGVYYCMHTLQPPYTFGQGTKLXIK

SEQ ID NO: 1468 - protein, 20 aa, Artificial Sequence
  Synthetic Construct
QSGPEVKKPGASVKVSCKSS

SEQ ID NO: 1469 - protein, 17 aa, Artificial Sequence
  Synthetic Construct
FNWVRQAPGQGLEWMGW

SEQ ID NO: 1470 - protein, 38 aa, Artificial Sequence
  Synthetic Construct
GFAQNFRGRISMTRNSSITTAYMELTSLTSDDTALYYC

SEQ ID NO: 1471 - protein, 11 aa, Artificial Sequence
  Synthetic Construct
WGRGTLVTVSS

SEQ ID NO: 1472 - protein, 26 aa, Artificial Sequence
  Synthetic Construct
  misc_feature (3)..(4): Xaa can be any naturally occurring amino acid
RCXXTQSQVSLPVTPGEPASISCRSS

SEQ ID NO: 1473 - protein, 17 aa, Artificial Sequence
  Synthetic Construct
VDWYLQKPGQSPQLLIY

SEQ ID NO: 1474 - protein, 36 aa, Artificial Sequence
  Synthetic Construct
  misc_feature (11)..(11): Xaa can be any naturally occurring amino acid
NPVSIFRVCIXGSGSGTDFTLKITRVEAEDVGVYYC

SEQ ID NO: 1475 - protein, 10 aa, Artificial Sequence
  Synthetic Construct
  misc_feature (8)..(8): Xaa can be any naturally occurring amino acid
FGQGTKLXIK

SEQ ID NO: 1476 - protein, 255 aa, Artificial Sequence
  Synthetic Construct
  misc_feature (142)..(142): Xaa can be any naturally occurring amino acid
  misc_feature (212)..(212): Xaa can be any naturally occurring amino acid
QSGPEVKKPGASVKVSCKSSGYTFSNYDFNWVRQAPGQGLEWMGWMNPKNGYSGFAQNFRGRISMTRNSSITTAYMELTSLTSDDTALYYCVRVRTISKGDSWYFDLWGRGTLVTVSSKGPSVFPLAPSSKSTSGGTAALGXLVKDYFPEPVTVSWNSGALTSGVHTFPAVLQSSGLYSLSSVVTVPSSSLGTQTYICNVNHKPSNTKVDKXVEPKSCDKTHTCPPCPAPELLGGPSVFLFPPKPKDTLMISRTP

SEQ ID NO: 1477 - protein, 216 aa, Artificial Sequence
  Synthetic Construct
  misc_feature (3)..(4): Xaa can be any naturally occurring amino acid
  misc_feature (68)..(68): Xaa can be any naturally occurring amino acid
  misc_feature (110)..(110): Xaa can be any naturally occurring amino acid
RCXXTQSQVSLPVTPGEPASISCRSSQSLLHNNGYNYVDWYLQKPGQSPQLLIYLVSNPVSIFRVCIXGSGSGTDFTLKITRVEAEDVGVYYCMHTLQPPYTFGQGTKLXIKAPSVFIFPPSDEQLKSGTASVVCLLNNFYPREAKVQWKVDNALQSGNSQESVTEQDSKDSTYSLSSTLTLSKADYEKHKVYACEVTHQGLSSPVTKSFNRGECK

SEQ ID NO: 1478 - DNA, 255 bp, Artificial Sequence
  Synthetic Construct
gcagtctgggcctgaggtgaagaagcctggggcctcagtgaaggtctcctgcaagtcttctggatataccttcagtaattatgacttcaactgggtgcgacaggcccctggacaagggcttgagtggatgggatggatgaaccctaaaaatggctactcaggcttcgcacagaatttccggggccggatatccatgaccaggaactcctccataaccacagcctacatggagctgaccagcctgacatctgatga

SEQ ID NO: 1479 - DNA, 255 bp, Artificial Sequence
  Synthetic Construct
  misc_feature (9)..(10): n is a, c, g, t or u
  misc_feature (202)..(202): n is a, c, g, t or u
cgatgttgnnagactcagtctcaagtctccctgcccgtcacccctggagagccggcctccatctcctgcaggtctagtcagagcctcctgcataacaatggatacaactatgtggattggtacctgcagaagccagggcagtctccacaactcctgatctatttggtttcgaacccagtctccatcttccgtgtctgcatcngtggcagtggatcaggcacagattttacactgaagatcaccagagtggaggct

SEQ ID NO: 1480 - protein, 8 aa, Artificial Sequence
  Synthetic Construct
GFTFNNYA

SEQ ID NO: 1481 - protein, 8 aa, Artificial Sequence
  Synthetic Construct
ISGRTGSA

SEQ ID NO: 1482 - protein, 17 aa, Artificial Sequence
  Synthetic Construct
ARDGQEGGNYAAEYFQN

SEQ ID NO: 1483 - protein, 6 aa, Artificial Sequence
  Synthetic Construct
QSISKW

SEQ ID NO: 1484 - protein, 3 aa, Artificial Sequence
  Synthetic Construct
KAS

SEQ ID NO: 1485 - protein, 9 aa, Artificial Sequence
  Synthetic Construct
QHFNTELLT

SEQ ID NO: 1486 - protein, 120 aa, Artificial Sequence
  Synthetic Construct
VESGGGLAQPGGSLTLSCAASGFTFNNYAMSWVRQAPGKGLEWVSGISGRTGSAHYADAVRGRFTISRDNAKNTLYLQMSSLRADDTATYYCARDGQEGGNYAAEYFQNWGQGTLVTVSS

SEQ ID NO: 1487 - protein, 107 aa, Artificial Sequence
  Synthetic Construct
  misc_feature (3)..(4): Xaa can be any naturally occurring amino acid
RHXXTQSPSTLAASVGDRVTITCRASQSISKWLAWYQQKPGKAPKLLIYKASRLQSGAPSRFSGSGSGTEFTLTINSLQPDDFATYYCQHFNTELLTFGGGTKVEIK

SEQ ID NO: 1488 - protein, 21 aa, Artificial Sequence
  Synthetic Construct
VESGGGLAQPGGSLTLSCAAS

SEQ ID NO: 1489 - protein, 17 aa, Artificial Sequence
  Synthetic Construct
MSWVRQAPGKGLEWVSG

SEQ ID NO: 1490 - protein, 38 aa, Artificial Sequence
  Synthetic Construct
HYADAVRGRFTISRDNAKNTLYLQMSSLRADDTATYYC

SEQ ID NO: 1491 - protein, 11 aa, Artificial Sequence
  Synthetic Construct
WGQGTLVTVSS

SEQ ID NO: 1492 - protein, 26 aa, Artificial Sequence
  Synthetic Construct
  misc_feature (3)..(4): Xaa can be any naturally occurring amino acid
RHXXTQSPSTLAASVGDRVTITCRAS

SEQ ID NO: 1493 - protein, 17 aa, Artificial Sequence
  Synthetic Construct
LAWYQQKPGKAPKLLIY

SEQ ID NO: 1494 - protein, 36 aa, Artificial Sequence
  Synthetic Construct
RLQSGAPSRFSGSGSGTEFTLTINSLQPDDFATYYC

SEQ ID NO: 1495 - protein, 10 aa, Artificial Sequence
  Synthetic Construct
FGGGTKVEIK

SEQ ID NO: 1496 - protein, 255 aa, Artificial Sequence
  Synthetic Construct
  misc_feature (144)..(144): Xaa can be any naturally occurring amino acid
  misc_feature (214)..(214): Xaa can be any naturally occurring amino acid
VESGGGLAQPGGSLTLSCAASGFTFNNYAMSWVRQAPGKGLEWVSGISGRTGSAHYADAVRGRFTISRDNAKNTLYLQMSSLRADDTATYYCARDGQEGGNYAAEYFQNWGQGTLVTVSSKGPSVFPLAPSSKSTSGGTAALGXLVKDYFPEPVTVSWNSGALTSGVHTFPAVLQSSGLYSLSSVVTVPSSSLGTQTYICNVNHKPSNTKVDKXVEPKSCDKTHTCPPCPAPELLGGPSVFLFPPKPKDTLMISR

SEQ ID NO: 1497 - protein, 211 aa, Artificial Sequence
  Synthetic Construct
  misc_feature (3)..(4): Xaa can be any naturally occurring amino acid
RHXXTQSPSTLAASVGDRVTITCRASQSISKWLAWYQQKPGKAPKLLIYKASRLQSGAPSRFSGSGSGTEFTLTINSLQPDDFATYYCQHFNTELLTFGGGTKVEIKAPSVFIFPPSDEQLKSGTASVVCLLNNFYPREAKVQWKVDNALQSGNSQESVTEQDSKDSTYSLSSTLTLSKADYEKHKVYACEVTHQGLSSPVTKSFNRGECK

SEQ ID NO: 1498 - DNA, 255 bp, Artificial Sequence
  Synthetic Construct
  misc_feature (3)..(3): n is a, c, g, t or u
gtngagtcggggggaggcctcgcacagcctgggggatccctgacactctcctgtgcagcgtctgggttcacattcaacaattatgccatgagctgggtccgccaggctccagggaaggggctggagtgggtctcaggaataagtgggagaactggtagcgcacactacgcagacgccgtgaggggccggttcaccatctccagagacaatgccaagaacacactgtatctccaaatgagcagcctgagagccgat

SEQ ID NO: 1499 - DNA, 255 bp, Artificial Sequence
  Synthetic Construct
  misc_feature (8)..(10): n is a, c, g, t or u
cgacatcnnnagacccagtctccttccaccctggctgcatctgtaggagacagagtcaccatcacttgccgggccagtcagagtattagtaagtggttggcctggtatcagcagaaaccagggaaagcccctaagctgctgatctataaggcatctcgtttacaaagtggggccccatcaaggttcagcggcagtggatctgggacagagttcactctcaccataaacagcctgcagcctgatgattttgcaact

SEQ ID NO: 1500 - protein, 8 aa, Artificial Sequence
  Synthetic Construct
GFTFRSYA

SEQ ID NO: 1501 - protein, 8 aa, Artificial Sequence
  Synthetic Construct
ISGSGGST

SEQ ID NO: 1502 - protein, 17 aa, Artificial Sequence
  Synthetic Construct
AKDGQTGGNYAAEYFQH

SEQ ID NO: 1503 - protein, 6 aa, Artificial Sequence
  Synthetic Construct
QSVSKW

SEQ ID NO: 1504 - protein, 3 aa, Artificial Sequence
  Synthetic Construct
KAS

SEQ ID NO: 1505 - protein, 9 aa, Artificial Sequence
  Synthetic Construct
QHFNTEQLT

SEQ ID NO: 1506 - protein, 119 aa, Artificial Sequence
  Synthetic Construct
ESGGGLVQPGGSLRLSCAASGFTFRSYAMSWVRQAPGKGLEWVSGISGSGGSTHYADSVEGRFAVSRDNSKNTVYLEMNSLRAEDTAVYYCAKDGQTGGNYAAEYFQHWGQGSLVTVSS

SEQ ID NO: 1507 - protein, 107 aa, Artificial Sequence
  Synthetic Construct
  misc_feature (4)..(4): Xaa can be any naturally occurring amino acid
RHRXTQSPSTLSASVGDRVTITCRASQSVSKWLAWYQQKAGKAPRLLIYKASTLDSGVPSRFSGSGSGTEFTLTISSLQPDDFATYYCQHFNTEQLTFGGGTKVEIK

SEQ ID NO: 1508 - protein, 20 aa, Artificial Sequence
  Synthetic Construct
ESGGGLVQPGGSLRLSCAAS

SEQ ID NO: 1509 - protein, 17 aa, Artificial Sequence
  Synthetic Construct
MSWVRQAPGKGLEWVSG

SEQ ID NO: 1510 - protein, 38 aa, Artificial Sequence
  Synthetic Construct
HYADSVEGRFAVSRDNSKNTVYLEMNSLRAEDTAVYYC

SEQ ID NO: 1511 - protein, 11 aa, Artificial Sequence
  Synthetic Construct
WGQGSLVTVSS

SEQ ID NO: 1512 - protein, 26 aa, Artificial Sequence
  Synthetic Construct
  misc_feature (4)..(4): Xaa can be any naturally occurring amino acid
RHRXTQSPSTLSASVGDRVTITCRAS

SEQ ID NO: 1513 - protein, 17 aa, Artificial Sequence
  Synthetic Construct
LAWYQQKAGKAPRLLIY

SEQ ID NO: 1514 - protein, 36 aa, Artificial Sequence
  Synthetic Construct
TLDSGVPSRFSGSGSGTEFTLTISSLQPDDFATYYC

SEQ ID NO: 1515 - protein, 10 aa, Artificial Sequence
  Synthetic Construct
FGGGTKVEIK

SEQ ID NO: 1516 - protein, 255 aa, Artificial Sequence
  Synthetic Construct
  misc_feature (143)..(143): Xaa can be any naturally occurring amino acid
  misc_feature (213)..(213): Xaa can be any naturally occurring amino acid
ESGGGLVQPGGSLRLSCAASGFTFRSYAMSWVRQAPGKGLEWVSGISGSGGSTHYADSVEGRFAVSRDNSKNTVYLEMNSLRAEDTAVYYCAKDGQTGGNYAAEYFQHWGQGSLVTVSSKGPSVFPLAPSSKSTSGGTAALGXLVKDYFPEPVTVSWNSGALTSGVHTFPAVLQSSGLYSLSSVVTVPSSSLGTQTYICNVNHKPSNTKVDKXVEPKSCDKTHTCPPCPAPELLGGPSVFLFPPKPKDTLMISRT

SEQ ID NO: 1517 - protein, 211 aa, Artificial Sequence
  Synthetic Construct
  misc_feature (4)..(4): Xaa can be any naturally occurring amino acid
RHRXTQSPSTLSASVGDRVTITCRASQSVSKWLAWYQQKAGKAPRLLIYKASTLDSGVPSRFSGSGSGTEFTLTISSLQPDDFATYYCQHFNTEQLTFGGGTKVEIKAPSVFIFPPSDEQLKSGTASVVCLLNNFYPREAKVQWKVDNALQSGNSQESVTEQDSKDSTYSLSSTLTLSKADYEKHKVYACEVTHQGLSSPVTKSFNRGECK

SEQ ID NO: 1518 - DNA, 255 bp, Artificial Sequence
  Synthetic Construct
gagtctgggggaggcttggtgcagcctggggggtccctgagactctcgtgtgcagcctctggattcacctttagaagttatgccatgagttgggtccgacaggctccagggaagggactggagtgggtctctggtattagtggtagtggcggcagcacacactatgcagactccgtggagggccggttcgccgtctccagagacaattccaagaacacggtgtatctggaaatgaacagcctgagagccgaggac

SEQ ID NO: 1519 - DNA, 255 bp, Artificial Sequence
  Synthetic Construct
  misc_feature (9)..(11): n is a, c, g, t or u
cgacatcgnnngacccagtctccttccaccctgtctgcatctgtgggagacagagtcaccatcacttgccgggccagtcagagtgttagtaagtggttggcctggtatcagcagaaagcagggaaagcccctaggctcctgatctacaaggcgtccactttagatagtggggtcccatcaaggttcagcggcagtggatctgggacagaattcactcttaccatcagcagcctgcagcctgatgattttgcaact

SEQ ID NO: 1520 - protein, 8 aa, Artificial Sequence
  Synthetic Construct
  misc_feature (5)..(5): Xaa can be any naturally occurring amino acid
  misc_feature (7)..(7): Xaa can be any naturally occurring amino acid
GFTFXSXA

SEQ ID NO: 1521 - protein, 8 aa, Artificial Sequence
  Synthetic Construct
  misc_feature (2)..(4): Xaa can be any naturally occurring amino acid
  misc_feature (7)..(7): Xaa can be any naturally occurring amino acid
IXXXGGXT

SEQ ID NO: 1522 - protein, 15 aa, Artificial Sequence
  Synthetic Construct
  misc_feature (1)..(7): Xaa can be any naturally occurring amino acid
  misc_feature (9)..(13): Xaa can be any naturally occurring amino acid
  misc_feature (15)..(15): Xaa can be any naturally occurring amino acid
XXXXXXXGXXXXXTX

SEQ ID NO: 1523 - protein, 7 aa, Artificial Sequence
  Synthetic Construct
QPISSTY

SEQ ID NO: 1524 - protein, 3 aa, Artificial Sequence
  Synthetic Construct
ATS

SEQ ID NO: 1525 - protein, 10 aa, Artificial Sequence
  Synthetic Construct
QHYSNSPPYT

SEQ ID NO: 1526 - protein, 107 aa, Artificial Sequence
  Synthetic Construct
  misc_feature (2)..(2): Xaa can be any naturally occurring amino acid
  misc_feature (5)..(5): Xaa can be any naturally occurring amino acid
  misc_feature (15)..(15): Xaa can be any naturally occurring amino acid
  misc_feature (17)..(17): Xaa can be any naturally occurring amino acid
  misc_feature (20)..(20): Xaa can be any naturally occurring amino acid
  misc_feature (25)..(25): Xaa can be any naturally occurring amino acid
  misc_feature (34)..(35): Xaa can be any naturally occurring amino acid
  misc_feature (37)..(39): Xaa can be any naturally occurring amino acid
  misc_feature (42)..(42): Xaa can be any naturally occurring amino acid
  misc_feature (44)..(44): Xaa can be any naturally occurring amino acid
  misc_feature (46)..(48): Xaa can be any naturally occurring amino acid
  misc_feature (54)..(54): Xaa can be any naturally occurring amino acid
  misc_feature (59)..(59): Xaa can be any naturally occurring amino acid
  misc_feature (62)..(62): Xaa can be any naturally occurring amino acid
  misc_feature (72)..(73): Xaa can be any naturally occurring amino acid
  misc_feature (78)..(78): Xaa can be any naturally occurring amino acid
  misc_feature (80)..(80): Xaa can be any naturally occurring amino acid
  misc_feature (82)..(88): Xaa can be any naturally occurring amino acid
  misc_feature (90)..(94): Xaa can be any naturally occurring amino acid
  misc_feature (96)..(96): Xaa can be any naturally occurring amino acid
  misc_feature (102)..(102): Xaa can be any naturally occurring amino acid
GXLRXSCAASGFTFXSXAMXWVRQXPGKGLEWVXXIXXXGGXTXYXXXVKGRFXISRDXSKXTLYLQMNSLXXEDTAXYXCXXXXXXXGXXXXXTXWGQGTXVTVSS

SEQ ID NO: 1527 - protein, 109 aa, Artificial Sequence
  Synthetic Construct
  misc_feature (3)..(4): Xaa can be any naturally occurring amino acid
EIXXTQSPGTLSLSLGEGATLSCRASQPISSTYLTWYQQRPGQAPRLLIYATSTRATDIPDRFSGSGSGTDFTLTISRLETEDFAVYYCQHYSNSPPYTFGQGTKLEIK

SEQ ID NO: 1528 - protein, 10 aa, Artificial Sequence
  Synthetic Construct
  misc_feature (2)..(2): Xaa can be any naturally occurring amino acid
  misc_feature (5)..(5): Xaa can be any naturally occurring amino acid
GXLRXSCAAS

SEQ ID NO: 1529 - protein, 17 aa, Artificial Sequence
  Synthetic Construct
  misc_feature (2)..(2): Xaa can be any naturally occurring amino acid
  misc_feature (7)..(7): Xaa can be any naturally occurring amino acid
  misc_feature (16)..(17): Xaa can be any naturally occurring amino acid
MXWVRQXPGKGLEWVXX

SEQ ID NO: 1530 - protein, 38 aa, Artificial Sequence
  Synthetic Construct
  misc_feature (1)..(1): Xaa can be any naturally occurring amino acid
  misc_feature (3)..(5): Xaa can be any naturally occurring amino acid
  misc_feature (11)..(11): Xaa can be any naturally occurring amino acid
  misc_feature (16)..(16): Xaa can be any naturally occurring amino acid
  misc_feature (19)..(19): Xaa can be any naturally occurring amino acid
  misc_feature (29)..(30): Xaa can be any naturally occurring amino acid
  misc_feature (35)..(35): Xaa can be any naturally occurring amino acid
  misc_feature (37)..(37): Xaa can be any naturally occurring amino acid
XYXXXVKGRFXISRDXSKXTLYLQMNSLXXEDTAXYXC

SEQ ID NO: 1531 - protein, 11 aa, Artificial Sequence
  Synthetic Construct
  misc_feature (6)..(6): Xaa can be any naturally occurring amino acid
WGQGTXVTVSS

SEQ ID NO: 1532 - protein, 26 aa, Artificial Sequence
  Synthetic Construct
  misc_feature (3)..(4): Xaa can be any naturally occurring amino acid
EIXXTQSPGTLSLSLGEGATLSCRAS

SEQ ID NO: 1533 - protein, 17 aa, Artificial Sequence
  Synthetic Construct
LTWYQQRPGQAPRLLIY

SEQ ID NO: 1534 - protein, 36 aa, Artificial Sequence
  Synthetic Construct
TRATDIPDRFSGSGSGTDFTLTISRLETEDFAVYYC

SEQ ID NO: 1535 - protein, 10 aa, Artificial Sequence
  Synthetic Construct
FGQGTKLEIK

SEQ ID NO: 1536 - protein, 255 aa, Artificial Sequence
  Synthetic Construct
  misc_feature (2)..(2): Xaa can be any naturally occurring amino acid
  misc_feature (5)..(5): Xaa can be any naturally occurring amino acid
  misc_feature (15)..(15): Xaa can be any naturally occurring amino acid
  misc_feature (17)..(17): Xaa can be any naturally occurring amino acid
  misc_feature (20)..(20): Xaa can be any naturally occurring amino acid
  misc_feature (25)..(25): Xaa can be any naturally occurring amino acid
  misc_feature (34)..(35): Xaa can be any naturally occurring amino acid
  misc_feature (37)..(39): Xaa can be any naturally occurring amino acid
  misc_feature (42)..(42): Xaa can be any naturally occurring amino acid
  misc_feature (44)..(44): Xaa can be any naturally occurring amino acid
  misc_feature (46)..(48): Xaa can be any naturally occurring amino acid
  misc_feature (54)..(54): Xaa can be any naturally occurring amino acid
  misc_feature (59)..(59): Xaa can be any naturally occurring amino acid
  misc_feature (62)..(62): Xaa can be any naturally occurring amino acid
  misc_feature (72)..(73): Xaa can be any naturally occurring amino acid
  misc_feature (78)..(78): Xaa can be any naturally occurring amino acid
  misc_feature (80)..(80): Xaa can be any naturally occurring amino acid
  misc_feature (82)..(88): Xaa can be any naturally occurring amino acid
  misc_feature (90)..(94): Xaa can be any naturally occurring amino acid
  misc_feature (96)..(96): Xaa can be any naturally occurring amino acid
  misc_feature (102)..(102): Xaa can be any naturally occurring amino acid
  misc_feature (131)..(131): Xaa can be any naturally occurring amino acid
  misc_feature (201)..(201): Xaa can be any naturally occurring amino acid
GXLRXSCAASGFTFXSXAMXWVRQXPGKGLEWVXXIXXXGGXTXYXXXVKGRFXISRDXSKXTLYLQMNSLXXEDTAXYXCXXXXXXXGXXXXXTXWGQGTXVTVSSKGPSVFPLAPSSKSTSGGTAALGXLVKDYFPEPVTVSWNSGALTSGVHTFPAVLQSSGLYSLSSVVTVPSSSLGTQTYICNVNHKPSNTKVDKXVEPKSCDKTHTCPPCPAPELLGGPSVFLFPPKPKDTLMISRTPEVTCVVVDVSH

SEQ ID NO: 1537 - protein, 213 aa, Artificial Sequence
  Synthetic Construct
  misc_feature (3)..(4): Xaa can be any naturally occurring amino acid
EIXXTQSPGTLSLSLGEGATLSCRASQPISSTYLTWYQQRPGQAPRLLIYATSTRATDIPDRFSGSGSGTDFTLTISRLETEDFAVYYCQHYSNSPPYTFGQGTKLEIKAPSVFIFPPSDEQLKSGTASVVCLLNNFYPREAKVQWKVDNALQSGNSQESVTEQDSKDSTYSLSSTLTLSKADYEKHKVYACEVTHQGLSSPVTKSFNRGECK

SEQ ID NO: 1538 - DNA, 255 bp, Artificial Sequence
  Synthetic Construct
  misc_feature (5)..(5): n is a, c, g, t or u
  misc_feature (13)..(13): n is a, c, g, t or u
  misc_feature (43)..(44): n is a, c, g, t or u
  misc_feature (114)..(114): n is a, c, g, t or u
  misc_feature (248)..(248): n is a, c, g, t or u
ggggncctgagantctcctgtgcagcctctggattcacctttnncagywakgccatgasctgggtccgccagrctccagggaagggrctggagtgggtyksmsstattarwrgnrrtggtggkasmacakactacrcwgmmyccgtgaarggcmgrttcaycatytcmagagayrattcmaarracacgytgtatctrcaratgaayagyctgararccgaggacacrgccstmtattwctgtrcsanaakaysa

SEQ ID NO: 1539 - DNA, 255 bp, Artificial Sequence
  Synthetic Construct
  misc_feature (8)..(10): n is a, c, g, t or u
gaaattgnnntgacgcagtctccaggcaccctgtctttgtctctaggtgaaggagccaccctctcctgcagggccagtcagcctattagtagcacctacttaacctggtaccagcagagacctggccaggctccccggctcctcatctacgctacgtccaccagggccactgacatcccagacaggttcagtggcagtggctctgggacagacttcactctcaccatcagtagactggagactgaagattttgca

SEQ ID NO: 1540 - protein, 8 aa, Artificial Sequence
  Synthetic Construct
GFPFDSHA

SEQ ID NO: 1541 - protein, 8 aa, Artificial Sequence
  Synthetic Construct
ISNNGASA

SEQ ID NO: 1542 - protein, 17 aa, Artificial Sequence
  Synthetic Construct
ARTQYYDSRGFYFSLDA

SEQ ID NO: 1543 - protein, 7 aa, Artificial Sequence
  Synthetic Construct
QPISSTY

SEQ ID NO: 1544 - protein, 3 aa, Artificial Sequence
  Synthetic Construct
ATS

SEQ ID NO: 1545 - protein, 10 aa, Artificial Sequence
  Synthetic Construct
QHYSNSPPYT

SEQ ID NO: 1546 - protein, 119 aa, Artificial Sequence
  Synthetic Construct
ESGGGVVQPGRSVRLSCVGSGFPFDSHAIHWVRQAPGWGLEWVAVISNNGASAHYTDSVKGRFTVSRDNSKHTVYLLLNSLTKEDTAVYYCARTQYYDSRGFYFSLDAWGQGTLVTVSS

SEQ ID NO: 1547 - protein, 109 aa, Artificial Sequence; identical to SEQ ID NO: 1527
  Synthetic Construct
  misc_feature (3)..(4): Xaa can be any naturally occurring amino acid

SEQ ID NO: 1548 - protein, 20 aa, Artificial Sequence
  Synthetic Construct
ESGGGVVQPGRSVRLSCVGS

SEQ ID NO: 1549 - protein, 17 aa, Artificial Sequence
  Synthetic Construct
IHWVRQAPGWGLEWVAV

SEQ ID NO: 1550 - protein, 38 aa, Artificial Sequence
  Synthetic Construct
HYTDSVKGRFTVSRDNSKHTVYLLLNSLTKEDTAVYYC

SEQ ID NO: 1551 - protein, 11 aa, Artificial Sequence
  Synthetic Construct
WGQGTLVTVSS

SEQ ID NO: 1552 - protein, 26 aa, Artificial Sequence
  Synthetic Construct
  misc_feature (3)..(4): Xaa can be any naturally occurring amino acid
EIXXTQSPGTLSLSLGEGATLSCRAS

SEQ ID NO: 1553 - protein, 17 aa, Artificial Sequence
  Synthetic Construct
LTWYQQRPGQAPRLLIY

SEQ ID NO: 1554 - protein, 36 aa, Artificial Sequence; identical to SEQ ID NO: 1534
  Synthetic Construct

SEQ ID NO: 1555 - protein, 10 aa, Artificial Sequence
  Synthetic Construct
FGQGTKLEIK

SEQ ID NO: 1556 - protein, 255 aa, Artificial Sequence
  Synthetic Construct
  misc_feature (143)..(143): Xaa can be any naturally occurring amino acid
  misc_feature (213)..(213): Xaa can be any naturally occurring amino acid
ESGGGVVQPGRSVRLSCVGSGFPFDSHAIHWVRQAPGWGLEWVAVISNNGASAHYTDSVKGRFTVSRDNSKHTVYLLLNSLTKEDTAVYYCARTQYYDSRGFYFSLDAWGQGTLVTVSSKGPSVFPLAPSSKSTSGGTAALGXLVKDYFPEPVTVSWNSGALTSGVHTFPAVLQSSGLYSLSSVVTVPSSSLGTQTYICNVNHKPSNTKVDKXVEPKSCDKTHTCPPCPAPELLGGPSVFLFPPKPKDTLMISRT

SEQ ID NO: 1557 - protein, 213 aa, Artificial Sequence; identical to SEQ ID NO: 1537
  Synthetic Construct
  misc_feature (3)..(4): Xaa can be any naturally occurring amino acid

SEQ ID NO: 1558 - DNA, 255 bp, Artificial Sequence
  Synthetic Construct
gagtctgggggaggcgttgtccagcctgggaggtccgtgagactctcctgtgtaggctctggattcccattcgatagtcatgccatacactgggtccgccaggctccaggctggggcctggagtgggtggcagttatctcaaacaatggcgccagtgcacattacacagactccgtgaagggccgattcaccgtctccagagacaattccaagcacaccgtctatctacttctgaacagtctgacaaaagaagac

SEQ ID NO: 1559 - DNA, 255 bp, Artificial Sequence; identical to SEQ ID NO: 1539
  Synthetic Construct
  misc_feature (8)..(10): n is a, c, g, t or u

SEQ ID NO: 1560 - protein, 8 aa, Artificial Sequence
  Synthetic Construct
GFTFSTFA

SEQ ID NO: 1561 - protein, 8 aa, Artificial Sequence
  Synthetic Construct
ISDNGNRK

SEQ ID NO: 1562 - protein, 17 aa, Artificial Sequence
  Synthetic Construct
AKTRDYDSRGYYFGLDH

SEQ ID NO: 1563 - protein, 7 aa, Artificial Sequence
  Synthetic Construct
QSVISNY

SEQ ID NO: 1564 - protein, 3 aa, Artificial Sequence
  Synthetic Construct
AAS

SEQ ID NO: 1565 - protein, 10 aa, Artificial Sequence
  Synthetic Construct
QHYGNSPPYT

SEQ ID NO: 1566 - protein, 123 aa, Artificial Sequence
  Synthetic Construct
  misc_feature (2)..(2): Xaa can be any naturally occurring amino acid
  misc_feature (91)..(91): Xaa can be any naturally occurring amino acid
CXLVESGGGVVQPGRSLRLSCAASGFTFSTFALHWVRQAPGKGLEWMAVISDNGNRKDYADSVKGRFTISRDNSENTLYLEMNSLRPEDTXVYYCAKTRDYDSRGYYFGLDHWGQGTLVTVSS

SEQ ID NO: 1567 - protein, 109 aa, Artificial Sequence
  Synthetic Construct
  misc_feature (4)..(4): Xaa can be any naturally occurring amino acid
EIGXTQSPGTLSLSPGERATLSCRASQSVISNYLAWYQHKPGQAPRLLIYAASSRATDIPDRFSGSGSGTDFILTISRLEPEDFAVYYCQHYGNSPPYTFGQGTKVEIK

SEQ ID NO: 1568 - protein, 24 aa, Artificial Sequence
  Synthetic Construct
  misc_feature (2)..(2): Xaa can be any naturally occurring amino acid
CXLVESGGGVVQPGRSLRLSCAAS

SEQ ID NO: 1569 - protein, 17 aa, Artificial Sequence
  Synthetic Construct
LHWVRQAPGKGLEWMAV

SEQ ID NO: 1570 - protein, 38 aa, Artificial Sequence
  Synthetic Construct
  misc_feature (34)..(34): Xaa can be any naturally occurring amino acid
DYADSVKGRFTISRDNSENTLYLEMNSLRPEDTXVYYC

SEQ ID NO: 1571 - protein, 11 aa, Artificial Sequence
  Synthetic Construct
WGQGTLVTVSS

SEQ ID NO: 1572 - protein, 26 aa, Artificial Sequence
  Synthetic Construct
  misc_feature (4)..(4): Xaa can be any naturally occurring amino acid
EIGXTQSPGTLSLSPGERATLSCRAS

SEQ ID NO: 1573 - protein, 17 aa, Artificial Sequence
  Synthetic Construct
LAWYQHKPGQAPRLLIY

SEQ ID NO: 1574 - protein, 36 aa, Artificial Sequence
  Synthetic Construct
SRATDIPDRFSGSGSGTDFILTISRLEPEDFAVYYC

SEQ ID NO: 1575 - protein, 10 aa, Artificial Sequence
  Synthetic Construct
FGQGTKVEIK

SEQ ID NO: 1576 - protein, 255 aa, Artificial Sequence
  Synthetic Construct
  misc_feature (2)..(2): Xaa can be any naturally occurring amino acid
  misc_feature (91)..(91): Xaa can be any naturally occurring amino acid
  misc_feature (147)..(147): Xaa can be any naturally occurring amino acid
  misc_feature (217)..(217): Xaa can be any naturally occurring amino acid
CXLVESGGGVVQPGRSLRLSCAASGFTFSTFALHWVRQAPGKGLEWMAVISDNGNRKDYADSVKGRFTISRDNSENTLYLEMNSLRPEDTXVYYCAKTRDYDSRGYYFGLDHWGQGTLVTVSSKGPSVFPLAPSSKSTSGGTAALGXLVKDYFPEPVTVSWNSGALTSGVHTFPAVLQSSGLYSLSSVVTVPSSSLGTQTYICNVNHKPSNTKVDKXVEPKSCDKTHTCPPCPAPELLGGPSVFLFPPKPKDTLM

SEQ ID NO: 1577 - protein, 213 aa, Artificial Sequence
  Synthetic Construct
  misc_feature (4)..(4): Xaa can be any naturally occurring amino acid
EIGXTQSPGTLSLSPGERATLSCRASQSVISNYLAWYQHKPGQAPRLLIYAASSRATDIPDRFSGSGSGTDFILTISRLEPEDFAVYYCQHYGNSPPYTFGQGTKVEIKAPSVFIFPPSDEQLKSGTASVVCLLNNFYPREAKVQWKVDNALQSGNSQESVTEQDSKDSTYSLSSTLTLSKADYEKHKVYACEVTHQGLSSPVTKSFNRGECK

SEQ ID NO: 1578 - DNA, 255 bp, Artificial Sequence
  Synthetic Construct
  misc_feature (7)..(8): n is a, c, g, t or u
ggtgccnnctggtggagtctgggggaggcgtggtccagcctgggaggtccctgagactctcctgtgcagcctctggattcacatttagtacctttgctctacattgggtccgccaggctccaggcaaggggctggagtggatggccgttatatcagataatgggaatagaaaagactacgcagactccgtgaagggccgattcaccatctcccgagacaactccgagaacacactgtatctggaaatgaacagcc

SEQ ID NO: 1579 - DNA, 255 bp, Artificial Sequence
  Synthetic Construct
  misc_feature (9)..(12): n is a, c, g, t or u
gaaataggnnnnacgcagtctccaggcaccctgtctttgtctccaggggaaagagccaccctctcctgcagggccagtcagagtgttatcagcaactacttagcctggtatcagcacaaacctggccaggctcccaggctcctcatctatgctgcctccagcagggccactgacatcccagacaggttcagtggcagtgggtctgggacagacttcattctcaccatcagcagactggagcctgaagattttgcg

SEQ ID NO: 1580 - protein, 8 aa, Artificial Sequence
  Synthetic Construct
GFTFSYYA

SEQ ID NO: 1581 - protein, 8 aa, Artificial Sequence
  Synthetic Construct
ISNDESHR

SEQ ID NO: 1582 - protein, 17 aa, Artificial Sequence
  Synthetic Construct
AKTLDYSNYGYYFGLDV

SEQ ID NO: 1583 - protein, 7 aa, Artificial Sequence
  Synthetic Construct
QSLSTNF

SEQ ID NO: 1584 - protein, 3 aa, Artificial Sequence
  Synthetic Construct
AAS

SEQ ID NO: 1585 - protein, 10 aa, Artificial Sequence
  Synthetic Construct
QRYGDSPPYT

SEQ ID NO: 1586 - protein, 120 aa, Artificial Sequence
  Synthetic Construct
VESGGGVVHPGKSLRLSCAASGFTFSYYAMHWVRQAPGKGLEWVAIISNDESHRTYADSVRGRFTISRDNSNNILFLQMNNVRVEDTAVYYCAKTLDYSNYGYYFGLDVWGQGTTVTVSS

SEQ ID NO: 1587 - protein, 83 aa, Artificial Sequence
  Synthetic Construct
  misc_feature (82)..(82): Xaa can be any naturally occurring amino acid
ATLSCRSSQSLSTNFLAWYQQKPGQTPRLLIYAASNRATGIPDRFSGSGSGTDFTLTISRLEPEDFAVYYCQRYGDSPPYTXG

SEQ ID NO: 1588 - protein, 21 aa, Artificial Sequence
  Synthetic Construct
VESGGGVVHPGKSLRLSCAAS

SEQ ID NO: 1589 - protein, 17 aa, Artificial Sequence
  Synthetic Construct
MHWVRQAPGKGLEWVAI

SEQ ID NO: 1590 - protein, 38 aa, Artificial Sequence
  Synthetic Construct
TYADSVRGRFTISRDNSNNILFLQMNNVRVEDTAVYYC

SEQ ID NO: 1591 - protein, 11 aa, Artificial Sequence
  Synthetic Construct
WGQGTTVTVSS

SEQ ID NO: 1592 - protein, 8 aa, Artificial Sequence
  Synthetic Construct
ATLSCRSS

SEQ ID NO: 1593 - protein, 17 aa, Artificial Sequence
  Synthetic Construct
LAWYQQKPGQTPRLLIY

SEQ ID NO: 1594 - protein, 36 aa, Artificial Sequence
  Synthetic Construct
NRATGIPDRFSGSGSGTDFTLTISRLEPEDFAVYYC

SEQ ID NO: 1595 - protein, 2 aa, Artificial Sequence
  Synthetic Construct
  misc_feature (1)..(1): Xaa can be any naturally occurring amino acid
XG

SEQ ID NO: 1596 - protein, 255 aa, Artificial Sequence
  Synthetic Construct
  misc_feature (144)..(144): Xaa can be any naturally occurring amino acid
  misc_feature (214)..(214): Xaa can be any naturally occurring amino acid
VESGGGVVHPGKSLRLSCAASGFTFSYYAMHWVRQAPGKGLEWVAIISNDESHRTYADSVRGRFTISRDNSNNILFLQMNNVRVEDTAVYYCAKTLDYSNYGYYFGLDVWGQGTTVTVSSKGPSVFPLAPSSKSTSGGTAALGXLVKDYFPEPVTVSWNSGALTSGVHTFPAVLQSSGLYSLSSVVTVPSSSLGTQTYICNVNHKPSNTKVDKXVEPKSCDKTHTCPPCPAPELLGGPSVFLFPPKPKDTLMISR

SEQ ID NO: 1597 - protein, 187 aa, Artificial Sequence
  Synthetic Construct
  misc_feature (82)..(82): Xaa can be any naturally occurring amino acid
ATLSCRSSQSLSTNFLAWYQQKPGQTPRLLIYAASNRATGIPDRFSGSGSGTDFTLTISRLEPEDFAVYYCQRYGDSPPYTXGAPSVFIFPPSDEQLKSGTASVVCLLNNFYPREAKVQWKVDNALQSGNSQESVTEQDSKDSTYSLSSTLTLSKADYEKHKVYACEVTHQGLSSPVTKSFNRGECK

SEQ ID NO: 1598 - DNA, 255 bp, Artificial Sequence
  Synthetic Construct
  misc_feature (3)..(3): n is a, c, g, t or u
gtngagtctgggggcggcgttgtccaccctgggaagtccctgagactctcctgtgcagcctctggattcacattctcttactatgcaatgcattgggtccgccaggctccaggcaagggactggagtgggtggcaattatatcaaatgatgaaagtcatagaacctacgcagactccgtgaggggccggttcaccatttccagagacaattccaacaacatcttatttctgcaaatgaacaacgtaagagtcgag

SEQ ID NO: 1599 - DNA, 250 bp, Artificial Sequence
  Synthetic Construct
  misc_feature (245)..(245): n is a, c, g, t or u
gccaccctctcctgcaggtccagtcagagtctcagcaccaatttcttagcctggtaccagcagaaacctggccagactcccaggctcctcatctacgctgcatccaacagggccactggcatcccagacaggttcagtggcagtgggtctgggacagacttcactctcaccatcagccggctggagcctgaagattttgcagtatattactgtcagcgctatggtgattcacctccgtacacttncggcc

SEQ ID NO: 1600 - protein, 8 aa, Artificial Sequence
  Synthetic Construct
GFTFNFFA

SEQ ID NO: 1601 - protein, 8 aa, Artificial Sequence
  Synthetic Construct
ISDNGGHK

SEQ ID NO: 1602 - protein, 17 aa, Artificial Sequence
  Synthetic Construct
AKTLDYSNYGYYFGLDA

SEQ ID NO: 1603 - protein, 7 aa, Artificial Sequence
  Synthetic Construct
QSVTSNY

SEQ ID NO: 1604 - protein, 3 aa, Artificial Sequence
  Synthetic Construct
GAS

SEQ ID NO: 1605 - protein, 10 aa, Artificial Sequence
  Synthetic Construct
QRYGNSPPYT

SEQ ID NO: 1606 - protein, 123 aa, Artificial Sequence
  Synthetic Construct
  misc_feature (2)..(3): Xaa can be any naturally occurring amino acid
VXXVESGGGVAQPGRSLTLSCATSGFTFNFFAMHWVRQAPGKGLEWVAVISDNGGHKSHAESLQGRFTISRDNSRSTLFLEMNSLRAEDTAVYYCAKTLDYSNYGYYFGLDAWGPGTTVVVSS

SEQ ID NO: 1607 - protein, 86 aa, Artificial Sequence
  Synthetic Construct
  misc_feature (85)..(85): Xaa can be any naturally occurring amino acid
ATLSCRASQSVTSNYLAWYQQKPGQAPRLLIYGASNRATGIPDRFSGSGSGTDFTLTISGLEPEDFAVYYCQRYGNSPPYTFGPXT

SEQ ID NO: 1608 - protein, 24 aa, Artificial Sequence
  Synthetic Construct
  misc_feature (2)..(3): Xaa can be any naturally occurring amino acid
VXXVESGGGVAQPGRSLTLSCATS

SEQ ID NO: 1609 - protein, 17 aa, Artificial Sequence
  Synthetic Construct
MHWVRQAPGKGLEWVAV

SEQ ID NO: 1610 - protein, 38 aa, Artificial Sequence
  Synthetic Construct
SHAESLQGRFTISRDNSRSTLFLEMNSLRAEDTAVYYC

SEQ ID NO: 1611 - protein, 11 aa, Artificial Sequence
  Synthetic Construct
WGPGTTVVVSS

SEQ ID NO: 1612 - protein, 8 aa, Artificial Sequence
  Synthetic Construct
ATLSCRAS

SEQ ID NO: 1613 - protein, 17 aa, Artificial Sequence
  Synthetic Construct
LAWYQQKPGQAPRLLIY

SEQ ID NO: 1614 - protein, 36 aa, Artificial Sequence
  Synthetic Construct
NRATGIPDRFSGSGSGTDFTLTISGLEPEDFAVYYC

SEQ ID NO: 1615 - protein, 5 aa, Artificial Sequence
  Synthetic Construct
  misc_feature (4)..(4): Xaa can be any naturally occurring amino acid
FGPXT

SEQ ID NO: 1616 - protein, 255 aa, Artificial Sequence
  Synthetic Construct
  misc_feature (2)..(3): Xaa can be any naturally occurring amino acid
  misc_feature (147)..(147): Xaa can be any naturally occurring amino acid
  misc_feature (217)..(217): Xaa can be any naturally occurring amino acid
VXXVESGGGVAQPGRSLTLSCATSGFTFNFFAMHWVRQAPGKGLEWVAVISDNGGHKSHAESLQGRFTISRDNSRSTLFLEMNSLRAEDTAVYYCAKTLDYSNYGYYFGLDAWGPGTTVVVSSKGPSVFPLAPSSKSTSGGTAALGXLVKDYFPEPVTVSWNSGALTSGVHTFPAVLQSSGLYSLSSVVTVPSSSLGTQTYICNVNHKPSNTKVDKXVEPKSCDKTHTCPPCPAPELLGGPSVFLFPPKPKDTLM

SEQ ID NO: 1617 - protein, 190 aa, Artificial Sequence
  Synthetic Construct
  misc_feature (85)..(85): Xaa can be any naturally occurring amino acid
ATLSCRASQSVTSNYLAWYQQKPGQAPRLLIYGASNRATGIPDRFSGSGSGTDFTLTISGLEPEDFAVYYCQRYGNSPPYTFGPXTAPSVFIFPPSDEQLKSGTASVVCLLNNFYPREAKVQWKVDNALQSGNSQESVTEQDSKDSTYSLSSTLTLSKADYEKHKVYACEVTHQGLSSPVTKSFNRGECK

SEQ ID NO: 1618 - DNA, 255 bp, Artificial Sequence
  Synthetic Construct
  misc_feature (5)..(5): n is a, c, g, t or u
  misc_feature (7)..(8): n is a, c, g, t or u
gtgcnannggtggagtctgggggaggcgtggcccagcctgggaggtcactgacgctctcctgtgcgacctctggattcaccttcaatttctttgcaatgcactgggtccgccaggctccaggcaaggggctggagtgggtggcagttatctcagataatggcggtcacaaatcccatgcagagtccctacagggccgattcaccatttccagagacaattccaggagcacgttgtttctggagatgaacagtctc

SEQ ID NO: 1619 - DNA, 255 bp, Artificial Sequence
  Synthetic Construct
  misc_feature (243)..(243): n is a, c, g, t or u
  misc_feature (254)..(254): n is a, c, g, t or u
gccaccctctcctgcagggccagtcagagtgttaccagcaactacttagcctggtaccagcagaaacctggccaggctcccaggctcctcatctatggtgcatccaacagggccactggcatcccagacaggttcagtggcagtgggtctgggacagacttcactctcaccatcagcggactggaacctgaagattttgcagtgtattactgtcagcgatatggtaactcacctccgtacacnttcggccctgng

SEQ ID NO: 1620 - protein, 8 aa, Artificial Sequence
  Synthetic Construct
GFTLSTYG

SEQ ID NO: 1621 - protein, 8 aa, Artificial Sequence
  Synthetic Construct
SPNRGSST

SEQ ID NO: 1622 - protein, 21 aa, Artificial Sequence
  Synthetic Construct
ARQTKYDFSRGYYKPYSWFDP

SEQ ID NO: 1623 - protein, 6 aa, Artificial Sequence
  Synthetic Construct
QSISTY

SEQ ID NO: 1624 - protein, 3 aa, Artificial Sequence
  Synthetic Construct
AAS

SEQ ID NO: 1625 - protein, 8 aa, Artificial Sequence
  Synthetic Construct
QQNYNMWT

SEQ ID NO: 1626 - protein, 128 aa, Artificial Sequence
  Synthetic Construct
QVQLVESGGGSVQPGGSLRLSCVGSGFTLSTYGMTWVRQAPRKGLEWVSLSPNRGSSTYYADSVKGRFTISRDNSKNTLYLQMNSLRVEDTAVYYCARQTKYDFSRGYYKPYSWFDPWGQGTLVTVSS

SEQ ID NO: 1627 - protein, 92 aa, Artificial Sequence
  Synthetic Construct
  misc_feature (92)..(92): Xaa can be any naturally occurring amino acid
ASVGDTVTISCRASQSISTYLNWYQQKPGKVPKLLIYAASSLESGVPSRFSGSGSGTDFTLTISSLQSEDFAIYYCQQNYNMWTFGQGTKVX

SEQ ID NO: 1628 - protein, 25 aa, Artificial Sequence
  Synthetic Construct
QVQLVESGGGSVQPGGSLRLSCVGS

SEQ ID NO: 1629 - protein, 17 aa, Artificial Sequence
  Synthetic Construct
MTWVRQAPRKGLEWVSL

SEQ ID NO: 1630 - protein, 38 aa, Artificial Sequence
  Synthetic Construct
YYADSVKGRFTISRDNSKNTLYLQMNSLRVEDTAVYYC

SEQ ID NO: 1631 - protein, 11 aa, Artificial Sequence
  Synthetic Construct
WGQGTLVTVSS

SEQ ID NO: 1632 - protein, 14 aa, Artificial Sequence
  Synthetic Construct
ASVGDTVTISCRAS

SEQ ID NO: 1633 - protein, 17 aa, Artificial Sequence
  Synthetic Construct
LNWYQQKPGKVPKLLIY

SEQ ID NO: 1634 - protein, 36 aa, Artificial Sequence
  Synthetic Construct
SLESGVPSRFSGSGSGTDFTLTISSLQSEDFAIYYC

SEQ ID NO: 1635 - protein, 8 aa, Artificial Sequence
  Synthetic Construct
  misc_feature (8)..(8): Xaa can be any naturally occurring amino acid
FGQGTKVX

SEQ ID NO: 1636 - protein, 255 aa, Artificial Sequence
  Synthetic Construct
  misc_feature (152)..(152): Xaa can be any naturally occurring amino acid
  misc_feature (222)..(222): Xaa can be any naturally occurring amino acid
QVQLVESGGGSVQPGGSLRLSCVGSGFTLSTYGMTWVRQAPRKGLEWVSLSPNRGSSTYYADSVKGRFTISRDNSKNTLYLQMNSLRVEDTAVYYCARQTKYDFSRGYYKPYSWFDPWGQGTLVTVSSKGPSVFPLAPSSKSTSGGTAALGXLVKDYFPEPVTVSWNSGALTSGVHTFPAVLQSSGLYSLSSVVTVPSSSLGTQTYICNVNHKPSNTKVDKXVEPKSCDKTHTCPPCPAPELLGGPSVFLFPPKP

SEQ ID NO: 1637 - protein, 196 aa, Artificial Sequence
  Synthetic Construct
  misc_feature (92)..(92): Xaa can be any naturally occurring amino acid
ASVGDTVTISCRASQSISTYLNWYQQKPGKVPKLLIYAASSLESGVPSRFSGSGSGTDFTLTISSLQSEDFAIYYCQQNYNMWTFGQGTKVXAPSVFIFPPSDEQLKSGTASVVCLLNNFYPREAKVQWKVDNALQSGNSQESVTEQDSKDSTYSLSSTLTLSKADYEKHKVYACEVTHQGLSSPVTKSFNRGECK

SEQ ID NO: 1638 - DNA, 255 bp, Artificial Sequence
  Synthetic Construct
caggtgcagctggtggagtctgggggaggctcagtccagcctggggggtccctgagactctcctgtgtaggctcgggattcacgcttagcacctatggcatgacgtgggtccgccaggctccacggaaggggctggagtgggtctcacttagtcccaatcgtggaagttccacatactacgcggactccgtgaagggccggttcaccatctccagagacaattccaagaacacactgtatctgcaaatgaatagc

SEQ ID NO: 1639 - DNA, 255 bp, Artificial Sequence
  Synthetic Construct
tgcatctgtaggagacacagtcaccatctcttgccgggcaagtcagagcattagcacctatttaaattggtatcaacagaaaccagggaaagtccctaaactcctaatctatgctgcatccagtttggaaagtggggtcccatcaaggttcagtggcagtggatctgggacagatttcactctcaccatcagcagtctgcagtctgaagattttgcaatttactactgtcaacagaattacaatatgtggacgtt

SEQ ID NO: 1640 - protein, 8 aa, Artificial Sequence
  Synthetic Construct
GDSISSYY

SEQ ID NO: 1641 - protein, 7 aa, Artificial Sequence
  Synthetic Construct
IFTSGST

SEQ ID NO: 1642 - protein, 19 aa, Artificial Sequence
  Synthetic Construct
ARDRRGLTPSGTWRRWFDP

SEQ ID NO: 1643 - protein, 6 aa, Artificial Sequence
  Synthetic Construct
QNIGSH

SEQ ID NO: 1644 - protein, 3 aa, Artificial Sequence
  Synthetic Construct
STS

SEQ ID NO: 1645 - protein, 9 aa, Artificial Sequence
  Synthetic Construct
QQSNSNTPT

SEQ ID NO: 1646 - protein, 121 aa, Artificial Sequence
  Synthetic Construct
QESGPGLVKPSETLSLTCSVSGDSISSYYWSWIRQPVGKRPEWIGRIFTSGSTNYNPSLTSRVTMSVDTPKNQFSLHLTSVTAADTAVYYCARDRRGLTPSGTWRRWFDPWGQGILVTISS

SEQ ID NO: 1647 - protein, 95 aa, Artificial Sequence
  Synthetic Construct
  misc_feature (8)..(8): Xaa can be any naturally occurring amino acid
  misc_feature (91)..(91): Xaa can be any naturally occurring amino acid
LSASVGDXITITCRASQNIGSHLNWYQQKTGTAPKLLIYSTSNLQDGVPSRFSGSGSGTDFTLTISSLLPEDFTIYYCQQSNSNTPTFGGXTKVE

SEQ ID NO: 1648 - protein, 21 aa, Artificial Sequence
  Synthetic Construct
QESGPGLVKPSETLSLTCSVS

SEQ ID NO: 1649 - protein, 17 aa, Artificial Sequence
  Synthetic Construct
WSWIRQPVGKRPEWIGR

SEQ ID NO: 1650 - protein, 38 aa, Artificial Sequence
  Synthetic Construct
NYNPSLTSRVTMSVDTPKNQFSLHLTSVTAADTAVYYC

SEQ ID NO: 1651 - protein, 11 aa, Artificial Sequence
  Synthetic Construct
WGQGILVTISS

SEQ ID NO: 1652 - protein, 16 aa, Artificial Sequence
  Synthetic Construct
  misc_feature (8)..(8): Xaa can be any naturally occurring amino acid
LSASVGDXITITCRAS

SEQ ID NO: 1653 - protein, 17 aa, Artificial Sequence
  Synthetic Construct
LNWYQQKTGTAPKLLIY

SEQ ID NO: 1654 - protein, 36 aa, Artificial Sequence
  Synthetic Construct
NLQDGVPSRFSGSGSGTDFTLTISSLLPEDFTIYYC

SEQ ID NO: 1655 - protein, 8 aa, Artificial Sequence
  Synthetic Construct
  misc_feature (4)..(4): Xaa can be any naturally occurring amino acid
FGGXTKVE

SEQ ID NO: 1656 - protein, 255 aa, Artificial Sequence
  Synthetic Construct
  misc_feature (145)..(145): Xaa can be any naturally occurring amino acid
  misc_feature (215)..(215): Xaa can be any naturally occurring amino acid
QESGPGLVKPSETLSLTCSVSGDSISSYYWSWIRQPVGKRPEWIGRIFTSGSTNYNPSLTSRVTMSVDTPKNQFSLHLTSVTAADTAVYYCARDRRGLTPSGTWRRWFDPWGQGILVTISSKGPSVFPLAPSSKSTSGGTAALGXLVKDYFPEPVTVSWNSGALTSGVHTFPAVLQSSGLYSLSSVVTVPSSSLGTQTYICNVNHKPSNTKVDKXVEPKSCDKTHTCPPCPAPELLGGPSVFLFPPKPKDTLMIS

SEQ ID NO: 1657 - protein, 199 aa, Artificial Sequence
  Synthetic Construct
  misc_feature (8)..(8): Xaa can be any naturally occurring amino acid
  misc_feature (91)..(91): Xaa can be any naturally occurring amino acid
LSASVGDXITITCRASQNIGSHLNWYQQKTGTAPKLLIYSTSNLQDGVPSRFSGSGSGTDFTLTISSLLPEDFTIYYCQQSNSNTPTFGGXTKVEAPSVFIFPPSDEQLKSGTASVVCLLNNFYPREAKVQWKVDNALQSGNSQESVTEQDSKDSTYSLSSTLTLSKADYEKHKVYACEVTHQGLSSPVTKSFNRGECK

SEQ ID NO: 1658 - DNA, 255 bp, Artificial Sequence
  Synthetic Construct
gcaggagtcgggcccaggactagtgaagccttcggagaccctgtccctcacttgcagtgtctctggtgactccatcagtagttactattggagttggatccgccagcccgtcgggaagcgaccggagtggattggccgtatttttaccagtggcagtaccaattataacccctccctaacgagtcgagtcactatgtcagtggacacgcccaagaaccagttctccctgcacctgacctctgtgaccgccgcgga

SEQ ID NO: 1659 - DNA, 255 bp, Artificial Sequence
  Synthetic Construct
  misc_feature (22)..(22): n is a, c, g, t or u
ctgtctgcatctgtgggagacngaatcaccatcacttgccgggcaagtcagaatattggcagccatttaaattggtatcagcagaaaacagggacagcccctaagctcctgatctattctacatccaatttgcaagatggggtcccatcaaggttcagtggcagtggatctgggacagatttcactctcaccatcagcagtctgctacctgaagattttacaatttactactgtcaacagagtaacagtaatact

SEQ ID NO: 1660 - protein, 8 aa, Artificial Sequence
  Synthetic Construct
GYTFSRYA

SEQ ID NO: 1661 - protein, 8 aa, Artificial Sequence
  Synthetic Construct
INGGDGNT

SEQ ID NO: 1662 - protein, 19 aa, Artificial Sequence
  Synthetic Construct
ARGRAYTYGRLSLSYAMDV

SEQ ID NO: 1663 - protein, 11 aa, Artificial Sequence
  Synthetic Construct
QSLLHSNGYNY

SEQ ID NO: 1664 - protein, 3 aa, Artificial Sequence
  Synthetic Construct
LGS

SEQ ID NO: 1665 - protein, 8 aa, Artificial Sequence
  Synthetic Construct
MQGLQTPL

SEQ ID NO: 1666 - protein, 119 aa, Artificial Sequence
  Synthetic Construct
GAEVKKPGASVRVFCKASGYTFSRYAIHWVRRAPGQRLEWMGRINGGDGNTDSSQKFQGRVTFTRDTSASTAYMELRSLRSEDSAVFYCARGRAYTYGRLSLSYAMDVWGQGTTVTVSS

SEQ ID NO: 1667 - protein, 85 aa, Artificial Sequence
  Synthetic Construct
  misc_feature (47)..(48): Xaa can be any naturally occurring amino acid
  misc_feature (53)..(53): Xaa can be any naturally occurring amino acid
  misc_feature (57)..(57): Xaa can be any naturally occurring amino acid
  misc_feature (80)..(80): Xaa can be any naturally occurring amino acid
CRSSQSLLHSNGYNYLDWYLQKPGQPPQLLIYLGSNRASGVPDRFSXXGSGTXFTLXISRVEAEDVGVYYCMQGLQTPLXGPGTR

SEQ ID NO: 1668 - protein, 18 aa, Artificial Sequence
  Synthetic Construct
GAEVKKPGASVRVFCKAS

SEQ ID NO: 1669 - protein, 17 aa, Artificial Sequence
  Synthetic Construct
IHWVRRAPGQRLEWMGR

SEQ ID NO: 1670 - protein, 38 aa, Artificial Sequence
  Synthetic Construct
DSSQKFQGRVTFTRDTSASTAYMELRSLRSEDSAVFYC

SEQ ID NO: 1671 - protein, 11 aa, Artificial Sequence
  Synthetic Construct
WGQGTTVTVSS

SEQ ID NO: 1672 - protein, 4 aa, Artificial Sequence
  Synthetic Construct
CRSS

SEQ ID NO: 1673 - protein, 17 aa, Artificial Sequence
  Synthetic Construct
LDWYLQKPGQPPQLLIY

SEQ ID NO: 1674 - protein, 36 aa, Artificial Sequence
  Synthetic Construct
  misc_feature (12)..(13): Xaa can be any naturally occurring amino acid
  misc_feature (18)..(18): Xaa can be any naturally occurring amino acid
  misc_feature (22)..(22): Xaa can be any naturally occurring amino acid
NRASGVPDRFSXXGSGTXFTLXISRVEAEDVGVYYC

SEQ ID NO: 1675 - protein, 6 aa, Artificial Sequence
  Synthetic Construct
  misc_feature (1)..(1): Xaa can be any naturally occurring amino acid
XGPGTR

SEQ ID NO: 1676 - protein, 255 aa, Artificial Sequence
  Synthetic Construct
  misc_feature (143)..(143): Xaa can be any naturally occurring amino acid
  misc_feature (213)..(213): Xaa can be any naturally occurring amino acid
GAEVKKPGASVRVFCKASGYTFSRYAIHWVRRAPGQRLEWMGRINGGDGNTDSSQKFQGRVTFTRDTSASTAYMELRSLRSEDSAVFYCARGRAYTYGRLSLSYAMDVWGQGTTVTVSSKGPSVFPLAPSSKSTSGGTAALGXLVKDYFPEPVTVSWNSGALTSGVHTFPAVLQSSGLYSLSSVVTVPSSSLGTQTYICNVNHKPSNTKVDKXVEPKSCDKTHTCPPCPAPELLGGPSVFLFPPKPKDTLMISRT

SEQ ID NO: 1677 - protein, 189 aa, Artificial Sequence
  Synthetic Construct
  misc_feature (47)..(48): Xaa can be any naturally occurring amino acid
  misc_feature (53)..(53): Xaa can be any naturally occurring amino acid
  misc_feature (57)..(57): Xaa can be any naturally occurring amino acid
  misc_feature (80)..(80): Xaa can be any naturally occurring amino acid
CRSSQSLLHSNGYNYLDWYLQKPGQPPQLLIYLGSNRASGVPDRFSXXGSGTXFTLXISRVEAEDVGVYYCMQGLQTPLXGPGTRAPSVFIFPPSDEQLKSGTASVVCLLNNFYPREAKVQWKVDNALQSGNSQESVTEQDSKDSTYSLSSTLTLSKADYEKHKVYACEVTHQGLSSPVTKSFNRGECK

SEQ ID NO: 1678 - DNA, 255 bp, Artificial Sequence
  Synthetic Construct
ggggctgaggtgaagaagcctggggcctcagtgagggttttctgcaaggcctctggatacaccttcagtaggtatgcaatacattgggtgcgccgggcacccggacaaaggcttgagtggatgggaaggatcaacggtggagatggcaacacagactcttcacagaagttccagggcagagtcacctttaccagggacacatccgcgagcacagcctatatggagctgaggagcctcagatctgaagactcggct

SEQ ID NO: 1679 - DNA, 255 bp, Artificial Sequence
  Synthetic Construct
  misc_feature (240)..(240): n is a, c, g, t or u
  misc_feature (250)..(250): n is a, c, g, t or u
ctgcaggtctagtcagagcctcctgcatagtaatggatacaactatttggattggtacctgcagaagccagggcagcctccacagctcctgatctatttgggttctaatcgggcctccggggtccctgacaggttcagtkgyrgtggatcaggyacwgaktttacactgawaatcagcagagtggaggctgaggatgttggggtttattactgcatgcaaggtctacaaactcccctttncggccctggnaccag

SEQ ID NO: 1680 - protein, 8 aa, Artificial Sequence
  Synthetic Construct
GYTFTSKG

SEQ ID NO: 1681 - protein, 8 aa, Artificial Sequence
  Synthetic Construct
ISAYDGNT

SEQ ID NO: 1682 - protein, 18 aa, Artificial Sequence
  Synthetic Construct
ATSGSPRAGRDSTVAFDY

SEQ ID NO: 1683 - protein, 7 aa, Artificial Sequence
  Synthetic Construct
QSVISSY

SEQ ID NO: 1684 - protein, 3 aa, Artificial Sequence
  Synthetic Construct
GAS

SEQ ID NO: 1685 - protein, 9 aa, Artificial Sequence
  Synthetic Construct
HQYGSSPGT

SEQ ID NO: 1686 - protein, 121 aa, Artificial Sequence
  Synthetic Construct
VQSGAEVKKPGASVKVSCRASGYTFTSKGITWVRQAPGQGLEWMGWISAYDGNTNYAQKFQGRVTMTTDTSTRTAYMELRSLRSDDTAVYHCATSGSPRAGRDSTVAFDYWGQGTLVTVSP

SEQ ID NO: 1687 - protein, 90 aa, Artificial Sequence
  Synthetic Construct
  misc_feature (3)..(3): Xaa can be any naturally occurring amino acid
  misc_feature (88)..(88): Xaa can be any naturally occurring amino acid
PGXRATLSCRASQSVISSYLAWYQQKPGQAPRLLIYGASSRVTGIPDRFSGSQSGTDFTFTISRLEPEDFAVYYCHQYGSSPGTFGQXTK

SEQ ID NO: 1688 - protein, 21 aa, Artificial Sequence
  Synthetic Construct
VQSGAEVKKPGASVKVSCRAS

SEQ ID NO: 1689 - protein, 17 aa, Artificial Sequence
  Synthetic Construct
ITWVRQAPGQGLEWMGW

SEQ ID NO: 1690 - protein, 38 aa, Artificial Sequence
  Synthetic Construct
NYAQKFQGRVTMTTDTSTRTAYMELRSLRSDDTAVYHC

SEQ ID NO: 1691 - protein, 11 aa, Artificial Sequence
  Synthetic Construct
WGQGTLVTVSP

SEQ ID NO: 1692 - protein, 12 aa, Artificial Sequence
  Synthetic Construct
  misc_feature (3)..(3): Xaa can be any naturally occurring amino acid
PGXRATLSCRAS

SEQ ID NO: 1693 - protein, 17 aa, Artificial Sequence
  Synthetic Construct
LAWYQQKPGQAPRLLIY

SEQ ID NO: 1694 - protein, 36 aa, Artificial Sequence
  Synthetic Construct
SRVTGIPDRFSGSQSGTDFTFTISRLEPEDFAVYYC

SEQ ID NO: 1695 - protein, 6 aa, Artificial Sequence
  Synthetic Construct
  misc_feature (4)..(4): Xaa can be any naturally occurring amino acid
FGQXTK

SEQ ID NO: 1696 - protein, 255 aa, Artificial Sequence
  Synthetic Construct
  misc_feature (145)..(145): Xaa can be any naturally occurring amino acid
  misc_feature (215)..(215): Xaa can be any naturally occurring amino acid
VQSGAEVKKPGASVKVSCRASGYTFTSKGITWVRQAPGQGLEWMGWISAYDGNTNYAQKFQGRVTMTTDTSTRTAYMELRSLRSDDTAVYHCATSGSPRAGRDSTVAFDYWGQGTLVTVSPKGPSVFPLAPSSKSTSGGTAALGXLVKDYFPEPVTVSWNSGALTSGVHTFPAVLQSSGLYSLSSVVTVPSSSLGTQTYICNVNHKPSNTKVDKXVEPKSCDKTHTCPPCPAPELLGGPSVFLFPPKPKDTLMIS

SEQ ID NO: 1697 - protein, 194 aa, Artificial Sequence
  Synthetic Construct
  misc_feature (3)..(3): Xaa can be any naturally occurring amino acid
  misc_feature (88)..(88): Xaa can be any naturally occurring amino acid
PGXRATLSCRASQSVISSYLAWYQQKPGQAPRLLIYGASSRVTGIPDRFSGSQSGTDFTFTISRLEPEDFAVYYCHQYGSSPGTFGQXTKAPSVFIFPPSDEQLKSGTASVVCLLNNFYPREAKVQWKVDNALQSGNSQESVTEQDSKDSTYSLSSTLTLSKADYEKHKVYACEVTHQGLSSPVTKSFNRGECK

SEQ ID NO: 1698 - DNA, 255 bp, Artificial Sequence
  Synthetic Construct
gtgcagtctggagctgaggtgaagaagccgggggcctcagtgaaggtctcctgcagggcttctggttacacctttaccagcaagggtatcacctgggtgcgacaggcccctggacaagggcttgagtggatgggatggatcagcgcttacgatggtaacacaaactatgcacagaaattccagggtagagtcaccatgaccacagacacatccacgaggactgcctacatggagctgaggagcctgagatctgac

SEQ ID NO: 1699 - DNA, 255 bp, Artificial Sequence
  Synthetic Construct
  misc_feature (9)..(11): n is a, c, g, t or u
ctccrgggnnnagagccaccctctcctgcagggccagtcagagtgttatcagcagctacttagcctggtaccagcagaagcctggccaggctcccaggctcctcatctatggtgcatccagcagggtcactggcatcccagacaggttcagtggcagtcagtctgggacagacttcactttcaccatcagcagactggagcctgaagattttgcagtgtattactgtcaccagtatggtagctcacctgggacgt

SEQ ID NO: 1700 - protein, 8 aa, Artificial Sequence
  Synthetic Construct
GFTFSPYS

SEQ ID NO: 1701 - protein, 8 aa, Artificial Sequence
  Synthetic Construct
ISASGDKR

SEQ ID NO: 1702 - protein, 21 aa, Artificial Sequence
  Synthetic Construct
ARDQLENFESGGYYWPLAFDV

SEQ ID NO: 1703 - protein, 6 aa, Artificial Sequence
  Synthetic Construct
EDIGTY

SEQ ID NO: 1704 - protein, 3 aa, Artificial Sequence
  Synthetic Construct
VAS

SEQ ID NO: 1705 - protein, 9 aa, Artificial Sequence
  Synthetic Construct
QQLNSYPLT

SEQ ID NO: 1706 - protein, 128 aa, Artificial Sequence
  Synthetic Construct
RCKLVESGGGLVQPGGSLRLSCVASGFTFSPYSMNWVRQAPGKGLEWISYISASGDKRDSADSVKGRFIISRDNSQNSLYLQLNSLRVDDTAVYYCARDQLENFESGGYYWPLAFDVWGQGTTVTVSS

SEQ ID NO: 1707 - protein, 89 aa, Artificial Sequence
  Synthetic Construct
  misc_feature (4)..(5): Xaa can be any naturally occurring amino acid
  misc_feature (88)..(88): Xaa can be any naturally occurring amino acid
SVGXXLTITCRASEDIGTYLAWYQQKPGTAPKLLIYVASTLQTGVPSRFSGSGSRTEFTLTINSLQPEDIATYYCQQLNSYPLTFGGXT

SEQ ID NO: 1708 - protein, 25 aa, Artificial Sequence
  Synthetic Construct
RCKLVESGGGLVQPGGSLRLSCVAS

SEQ ID NO: 1709 - protein, 17 aa, Artificial Sequence
  Synthetic Construct
MNWVRQAPGKGLEWISY

SEQ ID NO: 1710 - protein, 38 aa, Artificial Sequence
  Synthetic Construct
DSADSVKGRFIISRDNSQNSLYLQLNSLRVDDTAVYYC

SEQ ID NO: 1711 - protein, 11 aa, Artificial Sequence
  Synthetic Construct
WGQGTTVTVSS

SEQ ID NO: 1712 - protein, 13 aa, Artificial Sequence
  Synthetic Construct
  misc_feature (4)..(5): Xaa can be any naturally occurring amino acid
SVGXXLTITCRAS

SEQ ID NO: 1713 - protein, 17 aa, Artificial Sequence
  Synthetic Construct
LAWYQQKPGTAPKLLIY

SEQ ID NO: 1714 - protein, 36 aa, Artificial Sequence
  Synthetic Construct
TLQTGVPSRFSGSGSRTEFTLTINSLQPEDIATYYC

SEQ ID NO: 1715 - protein, 5 aa, Artificial Sequence
  Synthetic Construct
  misc_feature (4)..(4): Xaa can be any naturally occurring amino acid
FGGXT

SEQ ID NO: 1716 - protein, 255 aa, Artificial Sequence
  Synthetic Construct
  misc_feature (152)..(152): Xaa can be any naturally occurring amino acid
  misc_feature (222)..(222): Xaa can be any naturally occurring amino acid
RCKLVESGGGLVQPGGSLRLSCVASGFTFSPYSMNWVRQAPGKGLEWISYISASGDKRDSADSVKGRFIISRDNSQNSLYLQLNSLRVDDTAVYYCARDQLENFESGGYYWPLAFDVWGQGTTVTVSSKGPSVFPLAPSSKSTSGGTAALGXLVKDYFPEPVTVSWNSGALTSGVHTFPAVLQSSGLYSLSSVVTVPSSSLGTQTYICNVNHKPSNTKVDKXVEPKSCDKTHTCPPCPAPELLGGPSVFLFPPKP

SEQ ID NO: 1717 - protein, 193 aa, Artificial Sequence
  Synthetic Construct
  misc_feature (4)..(5): Xaa can be any naturally occurring amino acid
  misc_feature (88)..(88): Xaa can be any naturally occurring amino acid
SVGXXLTITCRASEDIGTYLAWYQQKPGTAPKLLIYVASTLQTGVPSRFSGSGSRTEFTLTINSLQPEDIATYYCQQLNSYPLTFGGXTAPSVFIFPPSDEQLKSGTASVVCLLNNFYPREAKVQWKVDNALQSGNSQESVTEQDSKDSTYSLSSTLTLSKADYEKHKVYACEVTHQGLSSPVTKSFNRGECK

SEQ ID NO: 1718 - DNA, 255 bp, Artificial Sequence
  Synthetic Construct
aggtgcaagctggtggagtctgggggaggcttggtccagccgggggggtccctgagactctcctgtgtagcctctggattcaccttcagtccctacagtatgaactgggtccgccaggctccagggaagggactggaatggatttcatacattagtgctagtggagataaaagagactctgcagactctgtgaagggccgattcatcatctccagagacaactcccagaactcactgtacctccaactcaacagt

SEQ ID NO: 1719 - DNA, 255 bp, Artificial Sequence
  Synthetic Construct
  misc_feature (15)..(16): n is a, c, g, t or u
atctgtagggracannctcaccatcacttgccgggccagtgaagacattggcacttatttagcctggtatcaacaaaaaccagggacagcccctaaactcctgatctatgttgcatccactttgcaaactggggtcccatcaaggttcagcggcagtggatctaggacagaattcactctcacaatcaacagcctgcagcctgaagatattgcgacttattactgtcaacaacttaatagttacccgctcacttt

SEQ ID NO: 1720 - protein, 8 aa, Artificial Sequence
  Synthetic Construct
GFMFSRFV

SEQ ID NO: 1721 - protein, 8 aa, Artificial Sequence
  Synthetic Construct
MSYDEKNK

SEQ ID NO: 1722 - protein, 14 aa, Artificial Sequence
  Synthetic Construct
VRGAYESSGHSFDH

SEQ ID NO: 1723 - protein, 6 aa, Artificial Sequence
  Synthetic Construct
QSVGVH

SEQ ID NO: 1724 - protein, 3 aa, Artificial Sequence
  Synthetic Construct
HTS

SEQ ID NO: 1725 - protein, 11 aa, Artificial Sequence
  Synthetic Construct
QHRSTWPPAWT

SEQ ID NO: 1726 - protein, 117 aa, Artificial Sequence
  Synthetic Construct
VESGGGVVQPGKSLRLSCAASGFMFSRFVLHWVRQAPGKGLEWVAVMSYDEKNKDYADSVKGRFTISRDNSKNTLDLQMTTVTPEDTAVYYCVRGAYESSGHSFDHWGQGTLVTVSS

SEQ ID NO: 1727 - protein, 91 aa, Artificial Sequence
  Synthetic Construct
  misc_feature (3)..(3): Xaa can be any naturally occurring amino acid
  misc_feature (89)..(89): Xaa can be any naturally occurring amino acid
PGXGATLSCRASQSVGVHLAWYQQRPGQAPRLLLWHTSNRATDIPARFSGSGSGTDFTLTISSLEPEDFAIYYCQHRSTWPPAWTFGQXTK

SEQ ID NO: 1728 - protein, 21 aa, Artificial Sequence
  Synthetic Construct
VESGGGVVQPGKSLRLSCAAS

SEQ ID NO: 1729 - protein, 17 aa, Artificial Sequence
  Synthetic Construct
LHWVRQAPGKGLEWVAV

SEQ ID NO: 1730 - protein, 38 aa, Artificial Sequence
  Synthetic Construct
DYADSVKGRFTISRDNSKNTLDLQMTTVTPEDTAVYYC

SEQ ID NO: 1731 - protein, 11 aa, Artificial Sequence
  Synthetic Construct
WGQGTLVTVSS

SEQ ID NO: 1732 - protein, 12 aa, Artificial Sequence
  Synthetic Construct
  misc_feature (3)..(3): Xaa can be any naturally occurring amino acid
PGXGATLSCRAS

SEQ ID NO: 1733 - protein, 17 aa, Artificial Sequence
  Synthetic Construct
LAWYQQRPGQAPRLLLW

SEQ ID NO: 1734 - protein, 36 aa, Artificial Sequence
  Synthetic Construct
NRATDIPARFSGSGSGTDFTLTISSLEPEDFAIYYC

SEQ ID NO: 1735 - protein, 6 aa, Artificial Sequence
  Synthetic Construct
  misc_feature (4)..(4): Xaa can be any naturally occurring amino acid
FGQXTK

SEQ ID NO: 1736 - protein, 255 aa, Artificial Sequence
  Synthetic Construct
  misc_feature (141)..(141): Xaa can be any naturally occurring amino acid
  misc_feature (211)..(211): Xaa can be any naturally occurring amino acid
VESGGGVVQPGKSLRLSCAASGFMFSRFVLHWVRQAPGKGLEWVAVMSYDEKNKDYADSVKGRFTISRDNSKNTLDLQMTTVTPEDTAVYYCVRGAYESSGHSFDHWGQGTLVTVSSKGPSVFPLAPSSKSTSGGTAALGXLVKDYFPEPVTVSWNSGALTSGVHTFPAVLQSSGLYSLSSVVTVPSSSLGTQTYICNVNHKPSNTKVDKXVEPKSCDKTHTCPPCPAPELLGGPSVFLFPPKPKDTLMISRTPE

SEQ ID NO: 1737 - protein, 195 aa, Artificial Sequence
  Synthetic Construct
  misc_feature (3)..(3): Xaa can be any naturally occurring amino acid
  misc_feature (89)..(89): Xaa can be any naturally occurring amino acid
PGXGATLSCRASQSVGVHLAWYQQRPGQAPRLLLWHTSNRATDIPARFSGSGSGTDFTLTISSLEPEDFAIYYCQHRSTWPPAWTFGQXTKAPSVFIFPPSDEQLKSGTASVVCLLNNFYPREAKVQWKVDNALQSGNSQESVTEQDSKDSTYSLSSTLTLSKADYEKHKVYACEVTHQGLSSPVTKSFNRGECK

SEQ ID NO: 1738 - DNA, 255 bp, Artificial Sequence
  Synthetic Construct
tggtggagtctgggggaggcgtggtccagcctgggaagtccctgcgactctcctgtgcagcctctggattcatgttcagtaggtttgttctgcactgggtccgccaggccccgggcaagggcctagagtgggtggcagttatgtcatatgatgaaaagaataaagactacgcagactccgtgaagggccgattcaccatctccagagacaattccaagaacacgctggatctgcagatgactacagtgacacctg

SEQ ID NO: 1739 - DNA, 255 bp, Artificial Sequence
  Synthetic Construct
  misc_feature (5)..(5): n is a, c, g, t or u
  misc_feature (9)..(10): n is a, c, g, t or u
ctccngggnnaggagccactctctcctgcagggccagtcagagtgttggcgtccacttagcctggtaccaacagagacctggccaggctcccaggctcctcttgtggcatacatccaacagggccactgacatcccagccaggttcagcggcagtgggtctgggacagacttcactctcaccatcagcagccttgagcctgaagattttgcaatttattactgtcagcaccgtagcacctggcctccggcgtgga

SEQ ID NO: 1740 - protein, 8 aa, Artificial Sequence
  Synthetic Construct
QFRFHRYA

SEQ ID NO: 1741 - protein, 8 aa, Artificial Sequence
  Synthetic Construct
ISDVGRNE

SEQ ID NO: 1742 - protein, 17 aa, Artificial Sequence
  Synthetic Construct
ARTMDYDRHNNYFGLDV

SEQ ID NO: 1743 - protein, 7 aa, Artificial Sequence
  Synthetic Construct
HSVSSNF

SEQ ID NO: 1744 - protein, 3 aa, Artificial Sequence
  Synthetic Construct
GSS

SEQ ID NO: 1745 - protein, 10 aa, Artificial Sequence
  Synthetic Construct
QHYGDSPPYT

SEQ ID NO: 1746 - protein, 122 aa, Artificial Sequence
  Synthetic Construct
  misc_feature (1)..(1): Xaa can be any naturally occurring amino acid
XLVESGGSVVQPGRSLRLSCGGSQFRFHRYALHWVRQVPGKGLEWLAVISDVGRNEHYADSVKGRFTISRDNSQNMFYLQMNSLRAEDTAVYFCARTMDYDRHNNYFGLDVWGQGTTVIVSS

SEQ ID NO: 1747 - protein, 90 aa, Artificial Sequence
  Synthetic Construct
  misc_feature (2)..(2): Xaa can be any naturally occurring amino acid
  misc_feature (85)..(85): Xaa can be any naturally occurring amino acid
  misc_feature (88)..(88): Xaa can be any naturally occurring amino acid
GXRVTLSCRTSHSVSSNFLAWYQQRPGQAPRLLIYGSSIRAAGIPDRISGSGSGTDFTLTISRLEPEDFAVYFCQHYGDSPPYTXGQXTK

SEQ ID NO: 1748 - protein, 23 aa, Artificial Sequence
  Synthetic Construct
  misc_feature (1)..(1): Xaa can be any naturally occurring amino acid
XLVESGGSVVQPGRSLRLSCGGS

SEQ ID NO: 1749 - protein, 17 aa, Artificial Sequence
  Synthetic Construct
LHWVRQVPGKGLEWLAV

SEQ ID NO: 1750 - protein, 38 aa, Artificial Sequence
  Synthetic Construct
HYADSVKGRFTISRDNSQNMFYLQMNSLRAEDTAVYFC

SEQ ID NO: 1751 - protein, 11 aa, Artificial Sequence
  Synthetic Construct
WGQGTTVIVSS

SEQ ID NO: 1752 - protein, 11 aa, Artificial Sequence
  Synthetic Construct
  misc_feature (2)..(2): Xaa can be any naturally occurring amino acid
GXRVTLSCRTS

SEQ ID NO: 1753 - protein, 17 aa, Artificial Sequence
  Synthetic Construct
LAWYQQRPGQAPRLLIY

SEQ ID NO: 1754 - protein, 36 aa, Artificial Sequence
  Synthetic Construct
IRAAGIPDRISGSGSGTDFTLTISRLEPEDFAVYFC

SEQ ID NO: 1755 - protein, 6 aa, Artificial Sequence
  Synthetic Construct
  misc_feature (1)..(1): Xaa can be any naturally occurring amino acid
  misc_feature (4)..(4): Xaa can be any naturally occurring amino acid
XGQXTK

SEQ ID NO: 1756 - protein, 255 aa, Artificial Sequence
  Synthetic Construct
  misc_feature (1)..(1): Xaa can be any naturally occurring amino acid
  misc_feature (146)..(146): Xaa can be any naturally occurring amino acid
  misc_feature (216)..(216): Xaa can be any naturally occurring amino acid
XLVESGGSVVQPGRSLRLSCGGSQFRFHRYALHWVRQVPGKGLEWLAVISDVGRNEHYADSVKGRFTISRDNSQNMFYLQMNSLRAEDTAVYFCARTMDYDRHNNYFGLDVWGQGTTVIVSSKGPSVFPLAPSSKSTSGGTAALGXLVKDYFPEPVTVSWNSGALTSGVHTFPAVLQSSGLYSLSSVVTVPSSSLGTQTYICNVNHKPSNTKVDKXVEPKSCDKTHTCPPCPAPELLGGPSVFLFPPKPKDTLMI

SEQ ID NO: 1757 - protein, 194 aa, Artificial Sequence
  Synthetic Construct
  misc_feature (2)..(2): Xaa can be any naturally occurring amino acid
  misc_feature (85)..(85): Xaa can be any naturally occurring amino acid
  misc_feature (88)..(88): Xaa can be any naturally occurring amino acid
GXRVTLSCRTSHSVSSNFLAWYQQRPGQAPRLLIYGSSIRAAGIPDRISGSGSGTDFTLTISRLEPEDFAVYFCQHYGDSPPYTXGQXTKAPSVFIFPPSDEQLKSGTASVVCLLNNFYPREAKVQWKVDNALQSGNSQESVTEQDSKDSTYSLSSTLTLSKADYEKHKVYACEVTHQGLSSPVTKSFNRGECK

SEQ ID NO: 1758 - DNA, 255 bp, Artificial Sequence
  Synthetic Construct
  misc_feature (3)..(3): n is a, c, g, t or u
canctggtggagtctgggggaagcgtagtccagcctgggaggtccctgagactctcctgtggaggctctcaattcaggttccatagatacgctctacactgggtccgccaggttcctgggaaggggctggagtggttggcagtcatctcagatgttggcaggaatgagcactatgcagactccgtgaagggccgcttcacgatctccagagacaactcccagaatatgttctatctccaaatgaacagcctgaga

SEQ ID NO: 1759 - DNA, 255 bp, Artificial Sequence
  Synthetic Construct
  misc_feature (7)..(8): n is a, c, g, t or u
caggggnncgggtcaccctctcttgcaggacaagtcacagtgtcagcagcaacttcttagcctggtaccagcagagacctggccaggctcccaggctcctcatttacggttcatccatcagggccgctggcatcccagacaggatcagtggcagtgggtctgggactgacttcactctcaccatcagtagactggagcctgaagattttgcagtgtatttttgtcaacactatggtgactcacctccgtacactt

SEQ ID NO: 1760 - protein, 8 aa, Artificial Sequence
  Synthetic Construct
GFDFGDDG

SEQ ID NO: 1761 - protein, 8 aa, Artificial Sequence
  Synthetic Construct
INWNGNKR

SEQ ID NO: 1762 - protein, 12 aa, Artificial Sequence
  Synthetic Construct
ARVNGRWLQLEN

SEQ ID NO: 1763 - protein, 6 aa, Artificial Sequence
  Synthetic Construct
QRIDSY

SEQ ID NO: 1764 - protein, 3 aa, Artificial Sequence
  Synthetic Construct
AAS

SEQ ID NO: 1765 - protein, 9 aa, Artificial Sequence
  Synthetic Construct
QQSYSTPRT

SEQ ID NO: 1766 - protein, 114 aa, Artificial Sequence
  Synthetic Construct
ESGGGVVRPGESLRLSCEVSGFDFGDDGMTWVRQGPGKGLEWVSGINWNGNKRGYADSVKGRFTISRDNTKNSLYLQMTSLRAEDTAFYYCARVNGRWLQLENWGQGILVTVSS

SEQ ID NO: 1767 - protein, 90 aa, Artificial Sequence
  Synthetic Construct
  misc_feature (89)..(89): Xaa can be any naturally occurring amino acid
ASIGDRVTITCQASQRIDSYLNWYQQKPGKAPKLLIYAASRLQSGVPSRFSGRESGTDFTLTISSLQSEDFATYYCQQSYSTPRTFGQXT

SEQ ID NO: 1768 - protein, 20 aa, Artificial Sequence
  Synthetic Construct
ESGGGVVRPGESLRLSCEVS

SEQ ID NO: 1769 - protein, 17 aa, Artificial Sequence
  Synthetic Construct
MTWVRQGPGKGLEWVSG

SEQ ID NO: 1770 - protein, 38 aa, Artificial Sequence
  Synthetic Construct
GYADSVKGRFTISRDNTKNSLYLQMTSLRAEDTAFYYC

SEQ ID NO: 1771 - protein, 11 aa, Artificial Sequence
  Synthetic Construct
WGQGILVTVSS

SEQ ID NO: 1772 - protein, 14 aa, Artificial Sequence
  Synthetic Construct
ASIGDRVTITCQAS

SEQ ID NO: 1773 - protein, 17 aa, Artificial Sequence
  Synthetic Construct
LNWYQQKPGKAPKLLIY

SEQ ID NO: 1774 - protein, 36 aa, Artificial Sequence
  Synthetic Construct
RLQSGVPSRFSGRESGTDFTLTISSLQSEDFATYYC

SEQ ID NO: 1775 - protein, 5 aa, Artificial Sequence
  Synthetic Construct
  misc_feature (4)..(4): Xaa can be any naturally occurring amino acid
FGQXT

SEQ ID NO: 1776 - protein, 255 aa, Artificial Sequence
  Synthetic Construct
  misc_feature (138)..(138): Xaa can be any naturally occurring amino acid
  misc_feature (208)..(208): Xaa can be any naturally occurring amino acid
ESGGGVVRPGESLRLSCEVSGFDFGDDGMTWVRQGPGKGLEWVSGINWNGNKRGYADSVKGRFTISRDNTKNSLYLQMTSLRAEDTAFYYCARVNGRWLQLENWGQGILVTVSSKGPSVFPLAPSSKSTSGGTAALGXLVKDYFPEPVTVSWNSGALTSGVHTFPAVLQSSGLYSLSSVVTVPSSSLGTQTYICNVNHKPSNTKVDKXVEPKSCDKTHTCPPCPAPELLGGPSVFLFPPKPKDTLMISRTPEVTC

SEQ ID NO: 1777 - protein, 194 aa, Artificial Sequence
  Synthetic Construct
  misc_feature (89)..(89): Xaa can be any naturally occurring amino acid
ASIGDRVTITCQASQRIDSYLNWYQQKPGKAPKLLIYAASRLQSGVPSRFSGRESGTDFTLTISSLQSEDFATYYCQQSYSTPRTFGQXTAPSVFIFPPSDEQLKSGTASVVCLLNNFYPREAKVQWKVDNALQSGNSQESVTEQDSKDSTYSLSSTLTLSKADYEKHKVYACEVTHQGLSSPVTKSFNRGECK

SEQ ID NO: 1778 - DNA, 255 bp, Artificial Sequence
  Synthetic Construct
gagtctgggggaggtgtggtacggcctggggagtccctgagactgtcctgtgaagtctctgggtttgactttggtgatgatggcatgacctgggtccgccaaggtccagggaaggggctggaatgggtctctggaattaattggaatggaaataagagaggttatgcagactctgtgaagggccgattcaccatctctagagacaacaccaagaactccctctatctacaaatgaccagtctcagagccgaggac

SEQ ID NO: 1779 - DNA, 255 bp, Artificial Sequence
  Synthetic Construct
gcatctataggagacagagtcaccatcacttgccaggcaagtcagaggattgacagttatttaaattggtatcagcagaaaccagggaaagcccctaagctcctgatctatgctgcatcccgcttgcaaagtggggtcccatcgaggttcagtggccgtgaatctgggacagatttcactctcaccatcagcagtctccaatctgaagattttgcaacttactactgtcaacagagttacagtacccctcgaacg

SEQ ID NO: 1780 - protein, 8 aa, Artificial Sequence
  Synthetic Construct
GGSISRYY

SEQ ID NO: 1781 - protein, 7 aa, Artificial Sequence
  Synthetic Construct
IYYSDTP

SEQ ID NO: 1782 - protein, 17 aa, Artificial Sequence
  Synthetic Construct
ARHNEPYGGNSDDYFDL

SEQ ID NO: 1783 - protein, 6 aa, Artificial Sequence
  Synthetic Construct
QTISDY

SEQ ID NO: 1784 - protein, 3 aa, Artificial Sequence
  Synthetic Construct
GAS

SEQ ID NO: 1785 - protein, 9 aa, Artificial Sequence
  Synthetic Construct
QQSYSIPLT

SEQ ID NO: 1786 - protein, 119 aa, Artificial Sequence
  Synthetic Construct
QESGPGLVKPSETLSLTCSVSGGSISRYYWSWIRQPPGQGLEWIAGIYYSDTPKYNPSLESRVTLSVDTSKNQFSLKLTSMTAADTAVYYCARHNEPYGGNSDDYFDLWGQGTLVTVSS

SEQ ID NO: 1787 - protein, 102 aa, Artificial Sequence
  Synthetic Construct
QSPSSLSAFVGDRVTITCRASQTISDYLNWYQHKPGKGPILLIYGASRLESGVPSRFTGSGSGTDFTLTIDSLEAEDFATYYCQQSYSIPLTFGGGTKVEMK

SEQ ID NO: 1788 - protein, 21 aa, Artificial Sequence
  Synthetic Construct
QESGPGLVKPSETLSLTCSVS

SEQ ID NO: 1789 - protein, 17 aa, Artificial Sequence
  Synthetic Construct
WSWIRQPPGQGLEWIAG

SEQ ID NO: 1790 - protein, 38 aa, Artificial Sequence
  Synthetic Construct
KYNPSLESRVTLSVDTSKNQFSLKLTSMTAADTAVYYC

SEQ ID NO: 1791 - protein, 11 aa, Artificial Sequence
  Synthetic Construct
WGQGTLVTVSS

SEQ ID NO: 1792 - protein, 21 aa, Artificial Sequence
  Synthetic Construct
QSPSSLSAFVGDRVTITCRAS

SEQ ID NO: 1793 - protein, 17 aa, Artificial Sequence
  Synthetic Construct
LNWYQHKPGKGPILLIY

SEQ ID NO: 1794 - protein, 36 aa, Artificial Sequence
  Synthetic Construct
RLESGVPSRFTGSGSGTDFTLTIDSLEAEDFATYYC

SEQ ID NO: 1795 - protein, 10 aa, Artificial Sequence
  Synthetic Construct
FGGGTKVEMK

SEQ ID NO: 1796 - protein, 255 aa, Artificial Sequence
  Synthetic Construct
  misc_feature (143)..(143): Xaa can be any naturally occurring amino acid
  misc_feature (213)..(213): Xaa can be any naturally occurring amino acid
QESGPGLVKPSETLSLTCSVSGGSISRYYWSWIRQPPGQGLEWIAGIYYSDTPKYNPSLESRVTLSVDTSKNQFSLKLTSMTAADTAVYYCARHNEPYGGNSDDYFDLWGQGTLVTVSSKGPSVFPLAPSSKSTSGGTAALGXLVKDYFPEPVTVSWNSGALTSGVHTFPAVLQSSGLYSLSSVVTVPSSSLGTQTYICNVNHKPSNTKVDKXVEPKSCDKTHTCPPCPAPELLGGPSVFLFPPKPKDTLMISRT

SEQ ID NO: 1797 - protein, 206 aa, Artificial Sequence
  Synthetic Construct
QSPSSLSAFVGDRVTITCRASQTISDYLNWYQHKPGKGPILLIYGASRLESGVPSRFTGSGSGTDFTLTIDSLEAEDFATYYCQQSYSIPLTFGGGTKVEMKAPSVFIFPPSDEQLKSGTASVVCLLNNFYPREAKVQWKVDNALQSGNSQESVTEQDSKDSTYSLSSTLTLSKADYEKHKVYACEVTHQGLSSPVTKSFNRGECK

SEQ ID NO: 1798 - DNA, 255 bp, Artificial Sequence
  Synthetic Construct
caggagtcgggcccaggactggtgaagccctcggaaaccctgtccctcacctgcagtgtctctggtggctccatcagtcgttactactggagctggatccggcagcccccagggcaggggctggagtggattgccggtatctattacagtgacacccccaagtacaacccctccctcgagagtcgagtcaccctatcagtagacacgtccaagaaccagttttccctgaagctgacctctatgaccgccgcagac

SEQ ID NO: 1799 - DNA, 255 bp, Artificial Sequence
  Synthetic Construct
ccagtctccatcctccctgtctgcatttgtaggagacagagtcaccattacttgccgggcaagtcagaccataagcgactatttaaattggtatcaacataaaccaggaaaaggccccatcctcctcatctatggcgcatcccgtttggaaagtggggtcccatcaaggttcactggcagcggatctgggacagatttcactctcaccatcgacagtctggaagctgaagattttgcaacttattactgtcaaca

SEQ ID NO: 1800 - protein, 8 aa, Artificial Sequence
  Synthetic Construct
GGSIGRHY

SEQ ID NO: 1801 - protein, 7 aa, Artificial Sequence
  Synthetic Construct
IYDSGST

SEQ ID NO: 1802 - protein, 17 aa, Artificial Sequence
  Synthetic Construct
ARHNAPYGGNSDDYFEF

SEQ ID NO: 1803 - protein, 6 aa, Artificial Sequence
  Synthetic Construct
ETISDY

SEQ ID NO: 1804 - protein, 3 aa, Artificial Sequence
  Synthetic Construct
AAS

SEQ ID NO: 1805 - protein, 9 aa, Artificial Sequence
  Synthetic Construct
QQSYSVPLT

SEQ ID NO: 1806 - protein, 119 aa, Artificial Sequence
  Synthetic Construct
QESGPGLVKPSETLSLTCTVSGGSIGRHYWSWIRQPPGKGLEWIAYIYDSGSTKYNPSLESRVTISEDTSQNQFSLKLTSVTAADTAIYYCARHNAPYGGNSDDYFEFWGPGTLVTVSS

SEQ ID NO: 1807 - protein, 103 aa, Artificial Sequence
  Synthetic Construct
TQSPSSLSASVGDRVTITCRANETISDYLNWYQGKPGTAPKPLIYAASSLQSGVPSRFSGSGSETYFTLTISSLQPEDFATYYCQQSYSVPLTFGGGTKVESK

SEQ ID NO: 1808 - protein, 21 aa, Artificial Sequence
  Synthetic Construct
QESGPGLVKPSETLSLTCTVS

SEQ ID NO: 1809 - protein, 17 aa, Artificial Sequence
  Synthetic Construct
WSWIRQPPGKGLEWIAY

SEQ ID NO: 1810 - protein, 38 aa, Artificial Sequence
  Synthetic Construct
KYNPSLESRVTISEDTSQNQFSLKLTSVTAADTAIYYC

SEQ ID NO: 1811 - protein, 11 aa, Artificial Sequence
  Synthetic Construct
WGPGTLVTVSS

SEQ ID NO: 1812 - protein, 22 aa, Artificial Sequence
  Synthetic Construct
TQSPSSLSASVGDRVTITCRAN

SEQ ID NO: 1813 - protein, 17 aa, Artificial Sequence
  Synthetic Construct
LNWYQGKPGTAPKPLIY

SEQ ID NO: 1814 - protein, 36 aa, Artificial Sequence
  Synthetic Construct
SLQSGVPSRFSGSGSETYFTLTISSLQPEDFATYYC

SEQ ID NO: 1815 - protein, 10 aa, Artificial Sequence
  Synthetic Construct
FGGGTKVESK

SEQ ID NO: 1816 - protein, 255 aa, Artificial Sequence
  Synthetic Construct
  misc_feature (143)..(143): Xaa can be any naturally occurring amino acid
  misc_feature (213)..(213): Xaa can be any naturally occurring amino acid
QESGPGLVKPSETLSLTCTVSGGSIGRHYWSWIRQPPGKGLEWIAYIYDSGSTKYNPSLESRVTISEDTSQNQFSLKLTSVTAADTAIYYCARHNAPYGGNSDDYFEFWGPGTLVTVSSKGPSVFPLAPSSKSTSGGTAALGXLVKDYFPEPVTVSWNSGALTSGVHTFPAVLQSSGLYSLSSVVTVPSSSLGTQTYICNVNHKPSNTKVDKXVEPKSCDKTHTCPPCPAPELLGGPSVFLFPPKPKDTLMISRT

SEQ ID NO: 1817 - protein, 207 aa, Artificial Sequence
  Synthetic Construct
TQSPSSLSASVGDRVTITCRANETISDYLNWYQGKPGTAPKPLIYAASSLQSGVPSRFSGSGSETYFTLTISSLQPEDFATYYCQQSYSVPLTFGGGTKVESKAPSVFIFPPSDEQLKSGTASVVCLLNNFYPREAKVQWKVDNALQSGNSQESVTEQDSKDSTYSLSSTLTLSKADYEKHKVYACEVTHQGLSSPVTKSFNRGECK

SEQ ID NO: 1818 - DNA, 255 bp, Artificial Sequence
  Synthetic Construct
caggagtcgggcccaggcctggtgaagccttcggagaccctgtccctcacctgcactgtctctggtggctccatcggtcgtcactactggagctggatccggcagcccccagggaaggggctggagtggattgcatatatctatgacagtgggagcaccaagtacaacccctccctcgagagtcgagtcaccatttcagaagacacgtcccagaaccagttctccctgaagctgacctctgtgaccgccgcagac

SEQ ID NO: 1819 - DNA, 255 bp, Artificial Sequence
  Synthetic Construct
gacccagtctccatcctccctgtctgcatctgtaggagacagagtcaccatcacttgccgggcaaatgagaccattagcgactatttaaattggtatcagggcaaaccagggacagcccctaaacccctgatctatgctgcatccagtttgcaaagtggggtcccatcaaggttcagtggcagtggatctgagacatatttcactctcaccatcagcagtctgcaacctgaggattttgcaacttactactgtca

SEQ ID NO: 1820 - protein, 8 aa, Artificial Sequence
  Synthetic Construct
GYPFTRFD

SEQ ID NO: 1821 - protein, 8 aa, Artificial Sequence
  Synthetic Construct
MNPKSGNT

SEQ ID NO: 1822 - protein, 8 aa, Artificial Sequence
  Synthetic Construct
AKGVESSF

SEQ ID NO: 1823 - protein, 12 aa, Artificial Sequence
  Synthetic Construct
QSLLDTSNNKNY

SEQ ID NO: 1824 - protein, 3 aa, Artificial Sequence
  Synthetic Construct
WAS

SEQ ID NO: 1825 - protein, 9 aa, Artificial Sequence
  Synthetic Construct
QQYYETPYI

SEQ ID NO: 1826 - protein, 111 aa, Artificial Sequence
  Synthetic Construct
VQSGAEVKKPGASVKVSCKASGYPFTRFDINWVRQAPGQGLEWVGWMNPKSGNTGHALKFQGRVAMTRNTSISTAYMELNSLTSEDTATYFCAKGVESSFWGPGTTVIVSS

SEQ ID NO: 1827 - protein, 90 aa, Artificial Sequence
  Synthetic Construct
  misc_feature (89)..(89): Xaa can be any naturally occurring amino acid
GERATINCKSSQSLLDTSNNKNYLGWYQQKRGQPPKLLIYWASNRESGVPDRFSGSGSGTEFTLTINSLQAEDVAVYYCQQYYETPYIXG

SEQ ID NO: 1828 - protein, 21 aa, Artificial Sequence
  Synthetic Construct
VQSGAEVKKPGASVKVSCKAS

SEQ ID NO: 1829 - protein, 17 aa, Artificial Sequence
  Synthetic Construct
INWVRQAPGQGLEWVGW

SEQ ID NO: 1830 - protein, 38 aa, Artificial Sequence
  Synthetic Construct
GHALKFQGRVAMTRNTSISTAYMELNSLTSEDTATYFC

SEQ ID NO: 1831 - protein, 11 aa, Artificial Sequence
  Synthetic Construct
WGPGTTVIVSS

SEQ ID NO: 1832 - protein, 11 aa, Artificial Sequence
  Synthetic Construct
GERATINCKSS

SEQ ID NO: 1833 - protein, 17 aa, Artificial Sequence
  Synthetic Construct
LGWYQQKRGQPPKLLIY

SEQ ID NO: 1834 - protein, 36 aa, Artificial Sequence
  Synthetic Construct
NRESGVPDRFSGSGSGTEFTLTINSLQAEDVAVYYC

SEQ ID NO: 1835 - protein, 2 aa, Artificial Sequence
  Synthetic Construct
  misc_feature (1)..(1): Xaa can be any naturally occurring amino acid
XG

SEQ ID NO: 1836 - protein, 255 aa, Artificial Sequence
  Synthetic Construct
  misc_feature (135)..(135): Xaa can be any naturally occurring amino acid
  misc_feature (205)..(205): Xaa can be any naturally occurring amino acid
VQSGAEVKKPGASVKVSCKASGYPFTRFDINWVRQAPGQGLEWVGWMNPKSGNTGHALKFQGRVAMTRNTSISTAYMELNSLTSEDTATYFCAKGVESSFWGPGTTVIVSSKGPSVFPLAPSSKSTSGGTAALGXLVKDYFPEPVTVSWNSGALTSGVHTFPAVLQSSGLYSLSSVVTVPSSSLGTQTYICNVNHKPSNTKVDKXVEPKSCDKTHTCPPCPAPELLGGPSVFLFPPKPKDTLMISRTPEVTCVVV

SEQ ID NO: 1837 - protein, 194 aa, Artificial Sequence
  Synthetic Construct
  misc_feature (89)..(89): Xaa can be any naturally occurring amino acid
GERATINCKSSQSLLDTSNNKNYLGWYQQKRGQPPKLLIYWASNRESGVPDRFSGSGSGTEFTLTINSLQAEDVAVYYCQQYYETPYIXGAPSVFIFPPSDEQLKSGTASVVCLLNNFYPREAKVQWKVDNALQSGNSQESVTEQDSKDSTYSLSSTLTLSKADYEKHKVYACEVTHQGLSSPVTKSFNRGECK

SEQ ID NO: 1838 - DNA, 255 bp, Artificial Sequence
  Synthetic Construct
gtgcaatctggggctgaggtgaagaagcctggggcctcagtgaaggtctcctgcaaggcttctggataccccttcaccagatttgatataaactgggtgcgacaggcccctggacaaggacttgagtgggtggggtggatgaatcctaagagtggcaatacaggccatgcactgaagttccagggcagagtcgccatgaccaggaacacctccataagcacagcctacatggagctgaacagcctgacatctgaa

SEQ ID NO: 1839 - DNA, 255 bp, Artificial Sequence
  Synthetic Construct
gggcgagagggccactatcaactgcaagtccagtcagagtcttttggacacctccaacaataagaattacttaggttggtaccagcagaaaaggggacagcctcctaaactgctcatttactgggcttccaaccgggaatccggggtccctgaccgattcagtggcagcgggtctgggacagagttcactctcaccatcaacagcctgcaggctgaagatgtggcagtttattactgtcagcagtattatgagac

SEQ ID NO: 1840 - protein, 8 aa, Artificial Sequence
  Synthetic Construct
GGSISSYY

SEQ ID NO: 1841 - protein, 7 aa, Artificial Sequence
  Synthetic Construct
IFTSGST

SEQ ID NO: 1842 - protein, 19 aa, Artificial Sequence
  Synthetic Construct
VRDRRGLLYSNIWYWSFDL

SEQ ID NO: 1843 - protein, 6 aa, Artificial Sequence
  Synthetic Construct
QSITNY

SEQ ID NO: 1844 - protein, 3 aa, Artificial Sequence
  Synthetic Construct
AAS

SEQ ID NO: 1845 - protein, 9 aa, Artificial Sequence
  Synthetic Construct
QQSYSTPWT

SEQ ID NO: 1846 - protein, 125 aa, Artificial Sequence
  Synthetic Construct
  misc_feature (5)..(7): Xaa can be any naturally occurring amino acid
  misc_feature (11)..(11): Xaa can be any naturally occurring amino acid
QVQLXXXGPGXVKPSETLSLTCSVSGGSISSYYWGWIRQPPGKGLEWIGRIFTSGSTNYNPSLESRVTMSVDMSKNQFSLSLSSVTAADTAVYYCVRDRRGLLYSNIWYWSFDLWGRGTLVTVSS

SEQ ID NO: 1847 - protein, 102 aa, Artificial Sequence
  Synthetic Construct
QSPSSLSASAGDRVTITCRASQSITNYLNWYQQKPMRAPKLLIYAASTLQSGVPSRFSGSGSGTDFTLTISSLQPEDFATYYCQQSYSTPWTFGQGTKVEIR

SEQ ID NO: 1848 - protein, 25 aa, Artificial Sequence
  Synthetic Construct
  misc_feature (5)..(7): Xaa can be any naturally occurring amino acid
  misc_feature (11)..(11): Xaa can be any naturally occurring amino acid
QVQLXXXGPGXVKPSETLSLTCSVS

SEQ ID NO: 1849 - protein, 17 aa, Artificial Sequence
  Synthetic Construct
WGWIRQPPGKGLEWIGR

SEQ ID NO: 1850 - protein, 38 aa, Artificial Sequence
  Synthetic Construct
NYNPSLESRVTMSVDMSKNQFSLSLSSVTAADTAVYYC

SEQ ID NO: 1851 - protein, 11 aa, Artificial Sequence
  Synthetic Construct
WGRGTLVTVSS

SEQ ID NO: 1852 - protein, 21 aa, Artificial Sequence
  Synthetic Construct
QSPSSLSASAGDRVTITCRAS

SEQ ID NO: 1853 - protein, 17 aa, Artificial Sequence
  Synthetic Construct
LNWYQQKPMRAPKLLIY

SEQ ID NO: 1854 - protein, 36 aa, Artificial Sequence
  Synthetic Construct
TLQSGVPSRFSGSGSGTDFTLTISSLQPEDFATYYC

SEQ ID NO: 1855 - protein, 10 aa, Artificial Sequence
  Synthetic Construct
FGQGTKVEIR

SEQ ID NO: 1856 - protein, 255 aa, Artificial Sequence
  Synthetic Construct
  misc_feature (5)..(7): Xaa can be any naturally occurring amino acid
  misc_feature (11)..(11): Xaa can be any naturally occurring amino acid
  misc_feature (149)..(149): Xaa can be any naturally occurring amino acid
  misc_feature (219)..(219): Xaa can be any naturally occurring amino acid
QVQLXXXGPGXVKPSETLSLTCSVSGGSISSYYWGWIRQPPGKGLEWIGRIFTSGSTNYNPSLESRVTMSVDMSKNQFSLSLSSVTAADTAVYYCVRDRRGLLYSNIWYWSFDLWGRGTLVTVSSKGPSVFPLAPSSKSTSGGTAALGXLVKDYFPEPVTVSWNSGALTSGVHTFPAVLQSSGLYSLSSVVTVPSSSLGTQTYICNVNHKPSNTKVDKXVEPKSCDKTHTCPPCPAPELLGGPSVFLFPPKPKDT

SEQ ID NO: 1857 - protein, 206 aa, Artificial Sequence
  Synthetic Construct
QSPSSLSASAGDRVTITCRASQSITNYLNWYQQKPMRAPKLLIYAASTLQSGVPSRFSGSGSGTDFTLTISSLQPEDFATYYCQQSYSTPWTFGQGTKVEIRAPSVFIFPPSDEQLKSGTASVVCLLNNFYPREAKVQWKVDNALQSGNSQESVTEQDSKDSTYSLSSTLTLSKADYEKHKVYACEVTHQGLSSPVTKSFNRGECK

SEQ ID NO: 1858 - DNA, 255 bp, Artificial Sequence
  Synthetic Construct
  misc_feature (15)..(18): n is a, c, g, t or u
  misc_feature (20)..(20): n is a, c, g, t or u
  misc_feature (31)..(31): n is a, c, g, t or u
caggtgcagctgcannnntngggcccaggantggtgaagccttcggagaccctgtccctcacctgcagtgtctctggtggctccatcagtagttactactggggctggatccggcagccccccgggaagggactggagtggattgggcgtatttttaccagtgggagcaccaactataacccctccctcgagagtcgcgtcaccatgtcagtagacatgtccaagaaccagttctccctgagcctgagctctgtg

SEQ ID NO: 1859 - DNA, 255 bp, Artificial Sequence
  Synthetic Construct
ccagtctccatcctccctgtctgcatctgcaggagacagagtcaccatcacttgccgggcaagtcagagcattactaactatttaaattggtatcaacagaaaccaatgagagcccctaagctcctgatctatgctgcatccactttgcaaagtggggtcccatcaaggttcagtggcagtggctctgggacagatttcactctcaccatcagcagtctgcaacctgaagattttgcaacttactactgtcaaca

SEQ ID NO: 1860 - protein, 8 aa, Artificial Sequence
  Synthetic Construct
GVYFSDWA

SEQ ID NO: 1861 - protein, 8 aa, Artificial Sequence
  Synthetic Construct
ISGRGANI

SEQ ID NO: 1862 - protein, 12 aa, Artificial Sequence
  Synthetic Construct
AKTPLLTRAFDV

SEQ ID NO: 1863 - protein, 6 aa, Artificial Sequence
  Synthetic Construct
QSVNTW

SEQ ID NO: 1864 - protein, 3 aa, Artificial Sequence
  Synthetic Construct
KVS

SEQ ID NO: 1865 - protein, 10 aa, Artificial Sequence
  Synthetic Construct
QQYNIDSRYS

SEQ ID NO: 1866 - protein, 116 aa, Artificial Sequence
  Synthetic Construct
LVESGGGSVPPGGSLRLSCVASGVYFSDWAMNWVRQAPGKGLEWISSISGRGANIYYAESVRGRFTTSRDNSQNTVFLDLTDLTVEDTALYFCAKTPLLTRAFDVWGQGTAVTVSA

SEQ ID NO: 1867 - protein, 108 aa, Artificial Sequence
  Synthetic Construct
DIVMTQSPSTLSASVGDRVTITCRASQSVNTWLAWYQQKPGKAPRLLIYKVSTLESGVPSRFSGSGSGTEFTLTISSLQPDDFATYYCQQYNIDSRYSFGPGTKVEIK

SEQ ID NO: 1868 - protein, 22 aa, Artificial Sequence
  Synthetic Construct
LVESGGGSVPPGGSLRLSCVAS

SEQ ID NO: 1869 - protein, 17 aa, Artificial Sequence
  Synthetic Construct
MNWVRQAPGKGLEWISS

SEQ ID NO: 1870 - protein, 38 aa, Artificial Sequence
  Synthetic Construct
YYAESVRGRFTTSRDNSQNTVFLDLTDLTVEDTALYFC

SEQ ID NO: 1871 - protein, 11 aa, Artificial Sequence
  Synthetic Construct
WGQGTAVTVSA

SEQ ID NO: 1872 - protein, 26 aa, Artificial Sequence
  Synthetic Construct
DIVMTQSPSTLSASVGDRVTITCRAS

SEQ ID NO: 1873 - protein, 17 aa, Artificial Sequence
  Synthetic Construct
LAWYQQKPGKAPRLLIY

SEQ ID NO: 1874 - protein, 36 aa, Artificial Sequence
  Synthetic Construct
TLESGVPSRFSGSGSGTEFTLTISSLQPDDFATYYC

SEQ ID NO: 1875 - protein, 10 aa, Artificial Sequence
  Synthetic Construct
FGPGTKVEIK

SEQ ID NO: 1876 - protein, 255 aa, Artificial Sequence
  Synthetic Construct
  misc_feature (140)..(140): Xaa can be any naturally occurring amino acid
  misc_feature (210)..(210): Xaa can be any naturally occurring amino acid
LVESGGGSVPPGGSLRLSCVASGVYFSDWAMNWVRQAPGKGLEWISSISGRGANIYYAESVRGRFTTSRDNSQNTVFLDLTDLTVEDTALYFCAKTPLLTRAFDVWGQGTAVTVSAKGPSVFPLAPSSKSTSGGTAALGXLVKDYFPEPVTVSWNSGALTSGVHTFPAVLQSSGLYSLSSVVTVPSSSLGTQTYICNVNHKPSNTKVDKXVEPKSCDKTHTCPPCPAPELLGGPSVFLFPPKPKDTLMISRTPEV

SEQ ID NO: 1877 - protein, 212 aa, Artificial Sequence
  Synthetic Construct
DIVMTQSPSTLSASVGDRVTITCRASQSVNTWLAWYQQKPGKAPRLLIYKVSTLESGVPSRFSGSGSGTEFTLTISSLQPDDFATYYCQQYNIDSRYSFGPGTKVEIKAPSVFIFPPSDEQLKSGTASVVCLLNNFYPREAKVQWKVDNALQSGNSQESVTEQDSKDSTYSLSSTLTLSKADYEKHKVYACEVTHQGLSSPVTKSFNRGECK

SEQ ID NO: 1878 - DNA, 255 bp, Artificial Sequence
  Synthetic Construct
ctggtggagtctgggggaggctcggttccgccgggggggtctttaagactctcctgtgtggcctctggagtttactttagcgactgggccatgaattgggtccgccaggctccagggaaggggctggagtggatctcaagtatcagcggccgcggcgctaacatatactacgccgagtccgtgaggggccgcttcaccacatccagagacaactcccagaacaccgtgtttctggatttgaccgacctgacagtc

SEQ ID NO: 1879 - DNA, 255 bp, Artificial Sequence
  Synthetic Construct
gacatcgtgatgacccagtctccttccaccctgtctgcatctgtcggagacagagtcaccatcacctgccgggccagtcagtctgttaatacgtggttggcctggtatcagcagaaaccagggaaagcccctaggctcctgatctataaggtgtctactttagaaagcggagtcccatcaaggttcagcggcagtgggtctgggacagagttcactctcaccatcagcagcctgcagcctgatgattttgcaact

SEQ ID NO: 1880 - protein, 4 aa, Artificial Sequence
  Synthetic Construct
DPYS

SEQ ID NO: 1881 - protein, 6 aa, Artificial Sequence
  Synthetic Construct
DPYSZS

SEQ ID NO: 1882 - protein, 6 aa, Artificial Sequence
  Synthetic Construct
QSQLER

SEQ ID NO: 1883 - protein, 7 aa, Artificial Sequence
  Synthetic Construct
KRELRNL

SEQ ID NO: 1884 - protein, 9 aa, Artificial Sequence
  Synthetic Construct
KRELRNLPQ

SEQ ID NO: 1885 - protein, 6 aa, Artificial Sequence
  Synthetic Construct
RQQEQQ

SEQ ID NO: 1886 - protein, 9 aa, Artificial Sequence
  Synthetic Construct
QGRQQEQQF

SEQ ID NO: 1887 - protein, 6 aa, Artificial Sequence
  Synthetic Construct
CEALQQ

What is claimed is:

1. A combination of anti-Ara h 2 antibodies for use in determining a treatment response of an individual with a peanut allergy to peanut exposure, wherein the combination comprises three or more anti-Ara h 2 antibodies that bind the following Ara h 2 epitope bins:
(a) a first epitope bin comprising epitopes of one or more of anti-Ara h 2 antibodies P34, T1, T3, P33, P17, P21, P3, P13, P10, P11, P14, P19, P28, P30, P39, U1, 13FU1P1A4, 13FU1P1B4, 14FU2P1A11, 15FU1P1A3, 13FU1P2B12, 11FUP1A2, 18FU1P1A7, 23FUP1A8, 23FUP1B8, 23FUP1C4, 23FUP1D6, 23FUP1D12, 24BU7P1A10, 24BU7P1B6, 24BU7P1D1, 24BU7P1C10, 24BU7P1D9, 24BU7P1C2, 105BU7P1A11, 105BU7P1C3, 105BU7P1D7, 105BU7P1 D12, and 33BU7P1 D11, wherein P34 comprises the following complementarity determining regions (CDRs): a CDR-H1 comprising the amino acid sequence of GFTFDDYT (SEQ ID NO:341), a CDR-H2 comprising the amino acid sequence of IRWDGSRT (SEQ ID NO:342), a CDR-H3 comprising the amino acid sequence of VKDGGLRYFDS (SEQ ID NO:343), a CDR-L1 comprising the amino acid sequence of QSLLHSNGIHY (SEQ ID NO:344), a CDR-L2 comprising the amino acid sequence of LGS (SEQ ID NO:345), and a CDR-L3 comprising the amino acid sequence of MQSLQTFT (SEQ ID NO:346);
(b) a second epitope bin comprising epitopes of one or more of anti-Ara h 2 antibodies P31, T4, T5, S4, 14FU2P1 D6, 15FU1P3A6, 13FU1P2B10, and 27FU1P3A10, wherein P31 comprises the following CDRs: a CDR-H1 comprising the amino acid sequence of GDPFTSYY (SEQ ID NO:301), a CDR-H2 comprising the amino acid sequence of IFTTGST (SEQ ID NO:302), a CDR-H3 comprising the amino acid sequence of ARVRRYCSGGRCYPYFYMDV (SEQ ID NO:303), a CDR-L1 comprising the amino acid sequence of ESISSW (SEQ ID NO:304), a CDR-L2 comprising the amino acid sequence of EAS (SEQ ID NO:305), and a CDR-L3 comprising the amino acid sequence of QHYNSDSLT (SEQ ID NO:306);
(c) a third epitope bin comprising an epitope of anti-Ara h 2 antibody S1, 27FU1P3A4, 6BU4P2B1, and 89BU7P1B10, wherein S1 comprises the following CDRs: a CDR-H1 comprising the amino acid sequence of GFSFSDSY (SEQ ID NO:381), a CDR-H2 comprising the amino acid sequence of ISGSGEII (SEQ ID NO:382), a CDR-H3 comprising the amino acid sequence of ARPSDYFETSEELD (SEQ ID NO:383), a CDR-L1 comprising the amino acid sequence of QSISTY (SEQ ID NO:384), a CDR-L2 comprising the amino acid sequence of AAS (SEQ ID NO:385), and a CDR-L3 comprising the amino acid sequence of HQSYSAPRT (SEQ ID NO:386); and, optionally,
(d) a fourth epitope bin comprising epitopes of one or more of anti-Ara h 2 antibodies P7, P6, 111BU7P1A12, 111BU7P1D2, 111BU7P1D5, 24BU7P1D3, and 24BU7P1B1, wherein P7 comprises the following CDRs: a CDR-H1 comprising the amino acid sequence of GFTFTRYA (SEQ ID NO:41), a CDR-H2 comprising the amino acid sequence of ISHDGGTK (SEQ ID NO:42), a CDR-H3 comprising the amino acid sequence of AKTCSSPSCYDTAYYFDY (SEQ ID NO:43), a CDR-L1 comprising the amino acid sequence of QSLGNY (SEQ ID NO:44), a CDR-L2 comprising the amino acid sequence of DAS (SEQ ID NO:45), and a CDR-L3 comprising the amino acid sequence of QQRSQFMWT (SEQ ID NO:46).

2. The combination of claim 1, wherein the epitopes of the one or more anti-Ara h 2 antibodies of the fourth epitope bin comprise the amino acid sequence of DPYS (SEQ ID NO:1880) or DPYSZS (SEQ ID NO:1881).

3. The combination of claim 1 or 2, wherein the combination further comprises one or more anti-Ara h 2 antibodies that bind:
(e) a fifth epitope bin comprising an epitopes of one or more anti-Ara h 2 antibodies 24B7D4, T6, 15FU1P3A1, 23FUP1C10, 23FUP1D8, and 24BU7P1D4.

4. The combination of claim 3, wherein the epitope of the one or more anti-Ara h 2 antibodies of the fifth epitope bin comprises the amino acid sequence of QSQLER (SEQ ID NO:1882).

5. The combination of any one of claims 1-4, wherein the combination further comprises one or more anti-Ara h 2 antibodies that bind:
(f) a sixth epitope bin comprising epitopes of one or more of anti-Ara h 2 antibodies P8, P16, and P22.

6. The combination of claim 5, wherein the epitopes of the one or more anti-Ara h 2 antibodies of the sixth epitope bin comprise the amino acid sequence of KRELRNL (SEQ ID NO:1883).

7. The combination of any one of claims 1-6, wherein the combination further comprises one or more anti-Ara h 2 antibodies that bind:
(g) a seventh epitope bin comprising epitopes of one or more anti-Ara h 2 antibodies 105BU7P1D6 and 105BU7P1D8.

8. The combination of claim 7, wherein the epitopes of the one or more anti-Ara h 2 antibodies of the seventh epitope bin comprise the amino acid sequence of RQQEQQ (SEQ ID NO:1885).

9. The combination of any one of claims 1-8, wherein the combination further comprises one or more anti-Ara h 2 antibodies that bind:
(h) an eighth epitope bin comprising an epitope of anti-Ara h 2 antibody 29BU7P1 D1.

10. The combination of claim 9, wherein epitopes of the one or more anti-Ara h 2 antibodies of the seventh epitope bin comprise the amino acid sequence of CEALQQ (SEQ ID NO:1887).

11. A combination of anti-Ara h 2 antibodies for use in determining a treatment response of an individual with a peanut allergy to peanut exposure, wherein the combination comprises anti-Ara h 2 antibodies:
(a) P34, P33, or P17;
(b) P31;
(c) S1; and
(d) P7.

12. The combination of claim 11, wherein the combination comprises anti-Ara h 2 antibodies:
(a) P34;
(b) P31;
(c) S1; and
(d) P7.

13. A method for assessing a treatment response of an individual with a peanut allergy to peanut exposure, the method comprising measuring anti-Ara h 2 antibodies in a sample from a subject using a competitive assay comprising one or more anti-Ara h 2 antibodies.

14. The method of claim 13, wherein the one or more anti-Ara h 2 antibodies comprise a combination of one or more anti-Ara h 2 antibodies that bind the following Ara h 2 epitope bins:
(a) a first epitope bin comprising epitopes of one or more of anti-Ara h 2 antibodies P34, T1, T3, P33, P17, P21, P3, P13, P10, P11, P14, P19, P28, P30, P39, U1, 13FU1P1A4, 13FU1P1B4, 14FU2P1A11, 15FU1P1A3, 13FU1P2B12, 11FUP1A2, 18FU1P1A7, 23FUP1A8, 23FUP1B8, 23FUP1C4, 23FUP1D6, 23FUP1D12, 24BU7P1A10, 24BU7P1B6, 24BU7P1D1, 24BU7P1C10, 24BU7P1D9, 24BU7P1C2, 105BU7P1A11, 105BU7P1C3, 105BU7P1D7, 105BU7P1D12, and 33BU7P1D11, wherein P34 comprises the following CDRs: a CDR-H1 comprising the amino acid sequence of GFTFDDYT (SEQ ID NO:341), a CDR-H2 comprising the amino acid sequence of IRWDGSRT (SEQ ID NO:342), a CDR-H3 comprising the amino acid sequence of VKDGGLRYFDS (SEQ ID NO:343), a CDR-L1 comprising the amino acid sequence of QSLLHSNGIHY (SEQ ID NO:344), a CDR-L2 comprising the amino acid sequence of LGS (SEQ ID NO:345), and a CDR-L3 comprising the amino acid sequence of MQSLQTFT (SEQ ID NO:346);
(b) a second epitope bin comprising epitopes of one or more of anti-Ara h 2 antibodies P31, T4, T5, S4, 14FU2P1 D6, 15FU1P3A6, 13FU1P2B10, and 27FU1P3A10, wherein P31 comprises the following CDRs: a CDR-H1 comprising the amino acid sequence of GDPFTSYY (SEQ ID NO:301), a CDR-H2 comprising the amino acid sequence of IFTTGST (SEQ ID NO:302), a CDR-H3 comprising the amino acid sequence of ARVRRYCSGGRCYPYFYMDV (SEQ ID NO:303), a CDR-L1 comprising the amino acid sequence of ESISSW (SEQ ID NO:304), a CDR-L2 comprising the amino acid sequence of EAS (SEQ ID NO:305), and a CDR-L3 comprising the amino acid sequence of QHYNSDSLT (SEQ ID NO:306);
(c) a third epitope bin comprising an epitope of anti-Ara h 2 antibody S1, 27FU1P3A4, 6BU4P2B1, and 89BU7P1B10, wherein S1 comprises the following CDRs: a CDR-H1 comprising the amino acid sequence of GFSFSDSY (SEQ ID NO:381), a CDR-H2 comprising the amino acid sequence of ISGSGEII (SEQ ID NO:382), a CDR-H3 comprising the amino acid sequence of ARPSDYFETSEELD (SEQ ID NO:383), a CDR-L1 comprising the amino acid sequence of QSISTY (SEQ ID NO:384), a CDR-L2 comprising the amino acid sequence of AAS (SEQ ID NO:385), and a CDR-L3 comprising the amino acid sequence of HQSYSAPRT (SEQ ID NO:386); and, optionally,
(d) a fourth epitope bin comprising epitopes of one or more of anti-Ara h 2 antibodies P7, P6, 111BU7P1A12, 111BU7P1D2, 111BU7P1D5, 24BU7P1D3, and 24BU7P1B1, wherein P7 comprises the following CDRs: a CDR-H1 comprising the amino acid sequence of GFTFTRYA (SEQ ID NO:41), a CDR-H2 comprising the amino acid sequence of ISHDGGTK (SEQ ID NO:42), a CDR-H3 comprising the amino acid sequence of AKTCSSPSCYDTAYYFDY (SEQ ID NO:43), a CDR-L1 comprising the amino acid sequence of QSLGNY (SEQ ID NO:44), a CDR-L2 comprising the amino acid sequence of DAS (SEQ ID NO:45), and a CDR-L3 comprising the amino acid sequence of QQRSQFMWT (SEQ ID NO:46).

15. The method of claim 14, wherein the epitopes of the one or more anti-Ara h 2 antibodies of the fourth epitope bin comprise the amino acid sequence of DPYS (SEQ ID NO:1880) or DPYSZS (SEQ ID NO:1881).

16. The method of claim 14 or 15, wherein the combination further comprises one or more anti-Ara h 2 antibodies that bind:
(e) a fifth epitope bin comprising epitopes of one or more anti-Ara h 2 antibodies 24B7D4, T6, 15FU1P3A1, 23FUP1C10, 23FUP1D8, and 24BU7P1D4.

17. The method of claim 16, wherein the epitope of the one or more anti-Ara h 2 antibodies of the fifth epitope bin comprises the amino acid sequence of QSQLER (SEQ ID NO:1882).

18. The method of any one of claims 14-17, wherein the combination further comprises one or more anti-Ara h 2 antibodies that bind:
(f) a sixth epitope bin comprising epitopes of one or more of anti-Ara h 2 antibodies P8, P16, and P22.

19. The method of claim 18, wherein the epitopes of the one or more anti-Ara h 2 antibodies of the sixth epitope bin comprise the amino acid sequence of KRELRNL (SEQ ID NO:1883).

20. The method of any one of claims 14-19, wherein the combination further comprises one or more anti-Ara h 2 antibodies that bind:
(g) a seventh epitope bin comprising epitopes of one or more anti-Ara h 2 antibodies 105BU7P1D6, and 105BU7P1D8.

21. The combination of claim 20, wherein the epitopes of the one or more anti-Ara h 2 antibodies of the seventh epitope bin comprise the amino acid sequence of RQQEQQ (SEQ ID NO:1885).

22. The combination of any one of claims 14-21, wherein the combination further comprises one or more anti-Ara h 2 antibodies that bind:
(h) an eighth epitope bin comprising an epitope of anti-Ara h 2 antibody 29BU7P1 D1.

23. The combination of claim 22, wherein epitopes of the one or more anti-Ara h 2 antibodies of the seventh epitope bin comprise the amino acid sequence of CEALQQ (SEQ ID NO:1887).

24. The method of any one of claims 14-23, wherein the combination comprises anti-Ara h 2 antibodies:
(a) P34, P33, or P17;
(b) P31;
(c) S1; and
(d) P7.

25. The method of claim 24, wherein the combination comprises anti-Ara h 2 antibodies:
(a) P34;
(b) P31;
(c) S1; and
(d) P7.

26. The method of any one of claims 13-25, wherein the competitive assay comprises bio-layer interferometry (BLI).

27. The method of any one of claims 13-26, wherein the sample is a plasma sample.

28. A kit comprising one or more anti-Ara h 2 antibodies and instructions for use in determining the presence or level of Ara h 2 antibodies in a sample.

29. The kit of claim 28, wherein the one or more anti-Ara h 2 antibodies comprise a combination of one or more anti-Ara h 2 antibodies that bind the following Ara h 2 epitope bins:
(a) a first epitope bin comprising epitopes of one or more of anti-Ara h 2 antibodies P34, T1, T3, P33, P17, P21, P3, P13, P10, P11, P14, P19, P28, P30, P39, U1, 13FU1P1A4, 13FU1P1B4, 14FU2P1A11, 15FU1P1A3, 13FU1P2B12, 11FUP1A2, 18FU1P1A7, 23FUP1A8, 23FUP1B8, 23FUP1C4, 23FUP1D6, 23FUP1 D12, 24BU7P1A10, 24BU7P1B6, 24BU7P1D1, 24BU7P1C10, 24BU7P1D9, 24BU7P1C2, 105BU7P1A11, 105BU7P1C3, 105BU7P1 D7, 105BU7P1 D12, and 33BU7P1 D11, wherein P34 comprises the following CDRs: a CDR-H1 comprising the amino acid sequence of GFTFDDYT (SEQ ID NO:341), a CDR-H2 comprising the amino acid sequence of IRWDGSRT (SEQ ID NO:342), a CDR-H3 comprising the amino acid sequence of VKDGGLRYFDS (SEQ ID NO:343), a CDR-L1 comprising the amino acid sequence of QSLLHSNGIHY (SEQ ID NO:344), a CDR-L2 comprising the amino acid sequence of LGS (SEQ ID NO:345), and a CDR-L3 comprising the amino acid sequence of MQSLQTFT (SEQ ID NO:346);
(b) a second epitope bin comprising epitopes of one or more of anti-Ara h 2 antibodies P31, T4, T5, S4, 14FU2P1 D6, 15FU1P3A6, 13FU1P2B10, and 27FU1P3A10, wherein P31 comprises the following CDRs: a CDR-H1 comprising the amino acid sequence of GDPFTSYY (SEQ ID NO:301), a CDR-H2 comprising the amino acid sequence of IFTTGST (SEQ ID NO:302), a CDR-H3 comprising the amino acid sequence of ARVRRYCSGGRCYPYFYMDV (SEQ ID NO:303), a CDR-L1 comprising the amino acid sequence of ESISSW (SEQ ID NO:304), a CDR-L2 comprising the amino acid sequence of EAS (SEQ ID NO:305), and a CDR-L3 comprising the amino acid sequence of QHYNSDSLT (SEQ ID NO:306);
(c) a third epitope bin comprising an epitope of anti-Ara h 2 antibody S1, 27FU1P3A4, 6BU4P2B1, and 89BU7P1B10, wherein S1 comprises the following CDRs: a CDR-H1 comprising the amino acid sequence of GFSFSDSY (SEQ ID NO:381), a CDR-H2 comprising the amino acid sequence of ISGSGEII (SEQ ID NO:382), a CDR-H3 comprising the amino acid sequence of ARPSDYFETSEELD (SEQ ID NO:383), a CDR-L1 comprising the amino acid sequence of QSISTY (SEQ ID NO:384), a CDR-L2 comprising the amino acid sequence of AAS (SEQ ID NO:385), and a CDR-L3 comprising the amino acid sequence of HQSYSAPRT (SEQ ID NO:386); and
(d) a fourth epitope bin comprising epitopes of one or more of anti-Ara h 2 antibodies P7, P6, 111BU7P1A12, 111BU7P1D2, 111BU7P1D5, 24BU7P1D3, and 24BU7P1B1, wherein P7 comprises the following CDRs: a CDR-H1 comprising the amino acid sequence of GFTFTRYA (SEQ ID NO:41), a CDR-H2 comprising the amino acid sequence of ISHDGGTK (SEQ ID NO:42), a CDR-H3 comprising the amino acid sequence of AKTCSSPSCYDTAYYFDY (SEQ ID NO:43), a CDR-L1 comprising the amino acid sequence of QSLGNY (SEQ ID NO:44), a CDR-L2 comprising the amino acid sequence of DAS (SEQ ID NO:45), and a CDR-L3 comprising the amino acid sequence of QQRSQFMWT (SEQ ID NO:46).

30. The kit of claim 29, wherein the epitopes of the one or more anti-Ara h 2 antibodies of the fourth epitope bin comprise the amino acid sequence of DPYS (SEQ ID NO:1880) or DPYSZS (SEQ ID NO:1881).

31. The kit of claim 29 or 30, wherein the combination further comprises one or more anti-Ara h 2 antibodies that bind:
(e) a fifth epitope bin comprising epitopes of one or more anti-Ara h 2 antibodies 24B7D4, T6, 15FU1P3A1, 23FUP1C10, 23FUP1D8, and 24BU7P1D4.

32. The kit of claim 31, wherein the epitope of the one or more anti-Ara h 2 antibodies of the fifth epitope bin comprises the amino acid sequence of QSQLER (SEQ ID NO:1882).

33. The kit of any one of claims 29-32, wherein the combination further comprises one or more anti Ara h 2 antibodies that bind:
(f) a sixth epitope bin comprising epitopes of one or more of anti-Ara h 2 antibodies P8, P16, and P22.

34. The kit of claim 33, wherein the epitopes of the one or more anti-Ara h 2 antibodies of the sixth epitope bin comprise the amino acid sequence of KRELRNL (SEQ ID NO:1883).

35. The kit of any one of claims 29-34, wherein the combination further comprises one or more anti-Ara h 2 antibodies that bind:
(g) a seventh epitope bin comprising epitopes of one or more anti-Ara h 2 antibodies 105BU7P1D6, and 105BU7P1D8.

36. The kit of claim 35, wherein the epitopes of the one or more anti-Ara h 2 antibodies of the seventh epitope bin comprise the amino acid sequence of RQQEQQ (SEQ ID NO:1885).

37. The kit of any one of claims 29-36, wherein the combination further comprises one or more anti-Ara h 2 antibodies that bind:
(h) an eighth epitope bin comprising an epitope of anti-Ara h 2 antibody 29BU7P1 D1.

38. The kit of claim 37, wherein epitopes of the one or more anti-Ara h 2 antibodies of the seventh epitope bin comprise the amino acid sequence of CEALQQ (SEQ ID NO:1887).

39. The kit of any one of claims 29-38, wherein the combination comprises anti-Ara h 2 antibodies:
(a) P34, P33, or P17;
(b) P31;
(c) S1; and
(d) P7.

40. The kit of claim 39, wherein the combination comprises anti-Ara h 2 antibodies:
(a) P34;
(b) P31;
(c) S1; and
(d) P7.
